(19) United States
(12) Patent Application Publication
(10) Pub. No.: US 2022/0088175 A1
(43) Pub. Date: Mar. 24, 2022

(54) OPTIMIZED VACCINE COMPOSITIONS AND METHODS FOR MAKING THE SAME

(71) Applicant: Centivax, Inc., South San Francisco, CA (US)

(72) Inventors: Jacob GLANVILLE, San Francisco, CA (US); Sarah IVES, South San Francisco, CA (US); Michal IZHAKY, Kirkland, WA (US); Sawsan YOUSSEF, Menlo Park, CA (US); Jean-Philippe BÜRCKERT, Belmont, CA (US)

(21) Appl. No.: 17/399,041

(22) Filed: Aug. 10, 2021

Related U.S. Application Data
(63) Continuation of application No. PCT/US2020/019367, filed on Feb. 21, 2020.
(60) Provisional application No. 62/808,760, filed on Feb. 21, 2019.
(60) Provisional application No. 62/817,902, filed on Mar. 13, 2019.

(51) Int. Cl. A61K 39/145; C12N 7/00

(52) U.S. Cl. CPC A61K 39/145; C12N 7/00; A61K 2039/55511; C12N 2760/16123; C12N 2760/16134

(57) ABSTRACT

Described herein are compositions of and methods of making vaccines which can provide broad serological reactivity an inverse dose response, and a swarm effect.

### CROSS-REFERENCE

[0001] This application is a continuation application of International Patent Application No. PCT/US2020/019367, filed Feb. 21, 2021, which claims the benefit of U.S. Provisional Application No. 62/808,760, filed Feb. 21, 2019, and U.S. Provisional Application No. 62/817,902, filed Mar. 13, 2019, each of which is incorporated herein by reference in its entirety.

### SEQUENCE LISTING

[0002] The instant application contains a Sequence Listing which has been submitted electronically in ASCII format and is hereby incorporated by reference in its entirety. Said ASCII copy, created on Aug. 9, 2021, is named 60333-703.301_SL.txt and is 1,484,708 bytes in size.

### BACKGROUND

[0003] Pathogenic agents such as, infectious bacteria, parasites, fungi, viruses, and cancers, have evolved various strategies to evade detection and neutralization by host immune response. Such strategies can often undermine and complicate the development of successful vaccines towards these pathogens. Rapid mutations can complicate vaccine design. Vaccination can enable a host to generate protective antibodies prior to infection. This can be accomplished by exposing the immune system of a host to an antigen or antigens of a pathogen or pathogens. When this is done for a relatively slowly mutating vaccine, a multi-year window for a single vaccine to match and provide protection can be afforded, and a vaccine can be successful.

[0004] Vaccination against rapidly mutating pathogens can provide limited protection, for example, because the immune system response against the vaccine can become obsolete. In some cases, the vaccine can become obsolete as antigens change over time. This can result in the requirement for a new vaccine on a periodic or semi-periodic basis, such as every year. In some cases, protection provided by such vaccines can vary, and some vaccines can for some periods or years provide poor protection. This can be due to incorrect predictions of viral strains likely to be in circulation the following season. In some cases, such as for the common cold, such rapid mutation can prevent the effectiveness of a vaccine.

### SUMMARY

[0005] Provided in this disclosure are vaccines comprising a set of antigens that are representative of at least 60% of fifth order clades of a microbe.

[0006] Also provided in this disclosure are vaccines comprising a set of antigens of a microbe wherein the smallest pairwise edit distance between two of the antigens is at least 10% of the average size of the antigens and the largest pairwise edit distance between two of the antigens is no more than 98% of the average size of the antigens.

[0007] Also provided in this disclosure are vaccines comprising a set of antigens that are representative of at least 60% of all operational taxonomic units (OTUs) of the microbe.

[0008] In some embodiments, an antigen is representative of a clade if its sequence is up to 40% of the average size of antigens of the represented clade different than other members of the represented clade. In some embodiments, an antigen is representative of a clade if the edit distance is up to 5% of the size of another strain of the represented clade. In some embodiments, an antigen is representative of a clade if its sequence is up to 20% of the average size of antigens of the represented clade different than at least 95%, 96%, 97%, 98%, or 99% of all strains of the represented clade. In some embodiments, an antigen is representative of a clade if its sequence is up to 10% of the average size of antigens of the represented clade different than at least 95%, 96%, 97%, 98%, or 99% of all strains of the represented clade. In some embodiments, an antigen is representative of a clade if the edit distance is up to 5% of the size of 95%, 96%, 97%, 98%, or 99% of all strains of the represented clade. In some embodiments, an antigen is representative of a clade if its sequence is up to 25 edit distance from all strains of the represented clade. In some embodiments, an antigen is representative of a clade if its sequence is up to 100 edit distance from all strains of the represented clade. In some embodiments, an antigen is representative of a clade if its sequence is present in the clade.

[0009] Also provided in this disclosure are vaccine compositions comprising a set of antigens, wherein the antigens are derived from a library of variants of a microbe wherein: a) two antigens of the set with the greatest edit distance have an edit distance S; b) two antigens of the library with the greatest edit distance have an edit distance L; and c) S is at least 60% of L.

[0010] Also provided in this disclosure are vaccine compositions comprising at least 4 influenza virus hemagglutinin antigen polypeptides, each represented by a sequence that is at least 20% identical, but not more than 95% identical, to the other influenza virus hemagglutinin antigen polypeptides, wherein each polypeptide comprises an antigen that is at least 90% identical among the 4 influenza virus hemagglutinin antigen polypeptides.

[0011] Also provided in this disclosure are vaccine compositions comprising at least 4 influenza virus neuraminidase antigen polypeptides, each represented by a sequence that is at least 20% identical, but not more than 95% identical, to the other influenza virus neuraminidase antigen polypeptides, wherein each polypeptide comprises an antigen that is at least 90% identical among the 4 influenza virus neuraminidase antigen polypeptides.

[0012] Also provided in this disclosure are vaccine compositions comprising at least 4 HIV gp160 antigen polypeptides, each represented by a sequence that is at least 20% identical, but not more than 95% identical, to the other HIV gp160 antigen polypeptides, wherein each polypeptide comprises an antigen that is at least 90% identical among the 4 HIV gp160 antigen polypeptides.

[0013] Also provided in this disclosure are vaccine compositions comprising at least 4 HIV gp120 antigen polypeptides, each represented by a sequence that is at least 20% identical, but not more than 95% identical, to the other HIV gp120 antigen polypeptides, wherein each polypeptide comprises an antigen that is at least 90% identical among the 4 HIV gp120 antigen polypeptides.

[0014] Also provided in this disclosure are vaccine compositions comprising at least 4 HIV gp41 antigen polypeptides, each represented by a sequence that is at least 20% identical, but not more than 95% identical, to the other HIV gp41 antigen polypeptides, wherein each polypeptide comprises an antigen that is at least 90% identical among the 4 HIV gp41 antigen polypeptides.

[0015] Also provided in this disclosure are vaccine compositions comprising a set of antigens that activate an immune response in a subject to at least 6 strains identified in Table 1.

[0016] In some embodiments, the immune response is detectable using head-specific antibodies in a hemagglutinin inhibition assay. In some embodiments, the immune response is at least 2-fold greater using the antigens than H1N1+H3N2+HAB, when tested using the hemagglutinin inhibition assay. In some embodiments, the immune response is at least 10-fold greater using the antigens than H1N1+H3N2+HAB, when tested using the hemagglutinin inhibition assay. In some embodiments, the immune response is at least 100-fold greater using the antigens than H1N1+H3N2+HAB, when tested using the hemagglutinin inhibition assay.

[0017] In some embodiments, the microbe is a bacterium. In some embodiments, the microbe is a virus. In some embodiments, the virus is influenza. In some embodiments, the influenza is type A. In some embodiments, the influenza is type B. In some embodiments, the type A influenza is H1N1, H1N2, H3N1, H3N2, or H2N3. In some embodiments, the type A influenza is H1N1. In some embodiments, the type A influenza is H3N2. In some embodiments, the virus is human immunodeficiency virus (HIV). In some embodiments, the HIV is HIV-1. In some embodiments, the HIV-1 is of subclade A, subclade B, or subclade C.

[0018] In some embodiments, the antigen is a broadly neutralizing antigen of surface exposed residues adjacent in tertiary space. In some embodiments, the broadly neutralizing antigen is in a stem of hemagglutinin. In some embodiments, the broadly neutralizing antigen is in a head of hemagglutinin. In some embodiments, the broadly neutralizing antigen is in a neuraminidase. In some embodiments, the broadly neutralizing antigen is in a gp160. In some embodiments, the broadly neutralizing antigen is in a gp120. In some embodiments, the broadly neutralizing antigen is in a gp41.

[0019] In some embodiments, the antigen is a broadly conserved fragment of hemagglutinin. In some embodiments, the antigen is a broadly conserved fragment of a head of hemagglutinin. In some embodiments, the antigen is a broadly conserved fragment of a stem of hemagglutinin. In some embodiments, the antigen is a broadly conserved fragment of neuraminidase. In some embodiments, the antigen is a broadly conserved fragment of gp160.

[0020] In some embodiments, the vaccine comprises at least one antigen selected from SEQ ID NOs:1-87. In some embodiments, the vaccine comprises at least one antigen that is at least 60% identical to any one of SEQ ID NOs:1-87. In some embodiments, the vaccine comprises at least one antigen that is at least 70% identical to any one of SEQ ID NOs:1-87. In some embodiments, the vaccine comprises at least one antigen that is at least 80% identical to any one of SEQ ID NOs:1-87. In some embodiments, the vaccine comprises at least one antigen that is at least 90% identical to any one of SEQ ID NOs:1-87. In some embodiments, the vaccine comprises at least one antigen selected from SEQ ID NOs:88-127. In some embodiments, the vaccine comprises at least one antigen that is at least 60% identical to any one of SEQ ID NOs:88-127. In some embodiments, the vaccine comprises at least one antigen that is at least 70% identical to any one of SEQ ID NOs:88-127. In some embodiments, the vaccine comprises at least one antigen that is at least 80% identical to any one of SEQ ID NOs:88-127. In some embodiments, the vaccine comprises at least one antigen that is at least 90% identical to any one of SEQ ID NOs:88-127. In some embodiments, the vaccine comprises at least one antigen selected from SEQ ID NOs:128-171. In some embodiments, the vaccine comprises at least one antigen that is at least 60% identical to any one of SEQ ID NOs:128-171. In some embodiments, the vaccine comprises at least one antigen that is at least 70% identical to any one of SEQ ID NOs:128-171. In some embodiments, the vaccine comprises at least one antigen that is at least 80% identical to any one of SEQ ID NOs:128-171. In some embodiments, the vaccine comprises at least one antigen that is at least 90% identical to any one of SEQ ID NOs:128-171. In some embodiments, the vaccine comprises at least one antigen selected from SEQ ID NOs:172-267. In some embodiments, the vaccine comprises at least one antigen that is at least 60% identical to any one of SEQ ID NOs:172-267. In some embodiments, the vaccine comprises at least one antigen that is at least 70% identical to any one of SEQ ID NOs:172-267. In some embodiments, the vaccine comprises at least one antigen that is at least 80% identical to any one of SEQ ID NOs:172-267. In some embodiments, the vaccine comprises at least one antigen that is at least 90% identical to any one of SEQ ID NOs:172-267.

[0021] In some embodiments, the set of antigens comprise at least 5, 6, 7, 8, 9, 10, 15, 20, 30, 40, 50, 60, 70, 80, 90, 100, 200, 300, 400, 500, 600, 700, 800, 900 or 1000 different antigens. In some embodiments, the set of antigens comprises at least 30 antigens. In some embodiments, the set of antigens comprises at least 50 antigens. In some embodiments, the antigens have an average edit distance from each of the other antigens that is at least 5% of the average size of antigens in the clade.

[0022] In some embodiments, a smallest pairwise edit distance between two or more of the antigens in the set is no more than 1, and the largest pairwise edit distance is at least 5, 10, 20, 30, 40, 50, 60, 70, 80, 90, or 100. In some embodiments, a smallest pairwise edit distance between two or more antigens in the set is no more than 5% of the size of the antigens, and the largest pairwise edit distance is at least 75% of the size of the antigens.

[0023] In some embodiments, the clades are clades of a phylogenetic tree is a neighbor joining clustering tree or maximum parsimony tree. In some embodiments, a first order clade is a clade that is not subsumed in whole or in part within another higher-level clade. In some embodiments, each X-order clade is phylogenetically below X−1 number branch nodes in a phylogenetic tree of the microbe. In some embodiments, the vaccine comprises antigens that are representative of at least 60% of each of third, fourth, fifth, sixth, seventh, eighth, ninth, tenth, eleventh, twelfth, thirteenth, fourteenth, or fifteenth order clades of the microbe. In some embodiments, a represented clade is a clade Y that is subsumed by a clade Y−1. In some embodiments, a representative clade is a node-based clade. In some embodiments, a representative clade is a stem-based clade. In some embodiments, a representative clade is apomorphy-based clade. In some embodiments, an average number of branches between each of the antigens in the set is at least 1, 3, 5, or 10. In some embodiments, a smallest number of branches between any two antigens in the set is no more than 1 and a largest number of branches between any two antigens in the set is at least 5, 10, or 15.

[0024] In some embodiments, each OTU comprises sequences that are at least 95% homologous of one another. In some embodiments, each OTU comprises of at least 3 different sequences.

[0025] In some embodiments, each of the antigens in the set shares at least 90%, 95, or 99% sequence identity to at least one other antigen in the set. In some embodiments, each of the antigens in the set shares at least 90%, 95, or 99% % sequence identity to at least one other antigen in the set over a length of at least 100 amino acids. In some embodiments, each of the antigens in the set differs from each of the other antigens in the set by at least 5% sequence identity. In some embodiments, each of the antigens in the set differs from each of the other antigens in the set by no more than 75% sequence identity.

[0026] In some embodiments, each antigen is a peptide comprising at least 10, 15, 20, 25, 30, 35, 40, 45, 50, 55, 60, 65, 70, 75, 80, 85, 90, 85, 100, 110, or 120 amino acids. In some embodiments, the antigens are selected from Table 2, Table 3, Table 4, Table 5, or a fragment or homologue thereof. In some embodiments, the vaccine comprises 2 or more antigens from Table 2, Table 3, Table 4, Table 5, or fragments or homologues thereof. In some embodiments, the vaccine comprises 3 or more antigens from Table 2, Table 3, Table 4, Table 5, or fragments or homologues thereof. In some embodiments, the vaccine comprises 5 or more antigens from Table 2, Table 3, Table 4, Table 5, or fragments or homologues thereof. In some embodiments, the vaccine comprises 10 or more antigens from Table 2, Table 3, Table 4, Table 5, or fragments or homologues thereof. In some embodiments, the fragment comprises at most 10, 15, 20, 25, 30, 35, 40, 45, 50, 55, 60, 65, 70, 75, 80, 85, 90, 95, 100, 110, or 120 amino acids. In some embodiments the fragment comprises at least 10, 15, 20, 25, 30, 35, 40, 45, 50, 55, 60, 65, 70, 75, 80, 85, 90, 95, 100, 110, or 120 amino acids. In some embodiments the homologue comprises a sequence having at least 90% sequence identity to the antigen of Table 1.

[0027] In some embodiments the library comprises at least 1×10⁴, 1×10⁵, 1×10⁶ different variants of the microbe. In some embodiments the library comprises at least 90% of all known sequences of the microbe.

[0028] Also provided in this disclosure are pharmaceutical compositions comprising the vaccine composition of any of the preceding claims and a pharmaceutically acceptable diluent, adjuvant, excipient, or any combinations thereof.

[0029] In some embodiments the vaccine is in a form of an aerosol formulation. In some embodiments the vaccine is in a form of an injectable formulation.

[0030] In some embodiments each of the antigens is at a concentration that alone does not provide a significant prophylactic immune response to the broadly neutralizing antigen in a subject; and collectively, the antigens have a combined concentration that provides an immune response to the broadly neutralizing antigen in the subject. In some embodiments the subject is a bird. In some embodiments the subject is a mammal. In some embodiments the subject is a human. In some embodiments the subject is a pig.

[0031] Also provided in this disclosure are virus like particles (VLPs) comprising the vaccine composition of any of the preceding claims.

[0032] Also provided in this disclosure are recombinant expression vectors comprising a nucleic acid molecule encoding: a) a set of antigens that are representative of at least 60% of each of first order clade and second order clades of a microbe; b) set of antigens wherein the smallest pairwise edit distance between two of the antigens is no more than 25 and the largest pairwise edit distance between two of the antigens is at least 300; c) set of antigens that are representative of at least 60% of all operational taxonomic units (OTUs) of the microbe; or d) set of antigens that are representative of at least 60% of all operational taxonomic units (OTUs) of the microbe.

[0033] Also provided in this disclosure are recombinant expression vector comprising a nucleic acid molecule encoding: a) a set of antigens that are representative of at least 60% of each of first order clade and second order clades of a microbe; b) a set of antigens wherein the smallest pairwise edit distance between two of the antigens is no more than 5% of the size of the antigens, and the largest pairwise edit distance is at least 75% of the size of the antigen; c) a set of antigens that are representative of at least 60% of all operational taxonomic units (OTUs) of the microbe; or d) a set of antigens that are representative of at least 60% of all operational taxonomic units (OTUs) of the microbe.

[0034] Also provided in this disclosure are methods for treating or reducing the likelihood of an infection in a subject, comprising administrating to the subject a vaccine composition of any of the preceding claims.

[0035] Also provided in this disclosure are methods for treating or reducing the likelihood of a flu infection in a subject, comprising administrating to the subject a vaccine composition that results in an immune activation effective against seasonal flu for at least 3, 4, 5, 6, 7, 8, 9, or 10 years.

[0036] In some methods, the subject is a human. In some methods, the subject is a domesticated animal.

[0037] Also provided in this disclosure are methods for making a vaccine composition, comprising: selecting a set of antigens that are (a) representative of at least 60% of each of first order clade and second order clades of a microbe; (b) set of antigens wherein the smallest pairwise edit distance between two of the antigens is no more than 5% of the size of the antigens, and the largest pairwise edit distance is at least 75% of the size of the antigens; (c) representative of at least 60% of all operational taxonomic units (OTUs) of the microbe; or (d) representative of at least 60% of all operational taxonomic units (OTUs) of the microbe.

[0038] In some embodiments, the method further comprises obtaining a plurality of antigen sequences from a library of strains of the microbe; and aligning the plurality of antigen sequences to create a phylogenetic tree of the antigen.

### INCORPORATION BY REFERENCE

[0039] All publications, patents, and patent applications mentioned in this specification are herein incorporated by reference to the same extent as if each individual publication, patent, or patent application was specifically and individually indicated to be incorporated by reference.

### BRIEF DESCRIPTION OF THE DRAWINGS

[0040] The novel features of the invention are set forth with particularity in the appended claims. A better understanding of the features and advantages of the present invention will be obtained by reference to the following detailed description that sets forth illustrative embodiments, in which the principles of the invention are utilized, and the accompanying drawings of which:

[0041] FIG. 1 illustrates examples of what is and is not a clade on a phylogenic tree.

[0042] FIG. 2 illustrates examples of three types of clades: a node-based clade, a branch-based clade, and an apomorphy-based clade.

[0043] FIG. 3 illustrates clade order in a phylogenic tree, with a third order clade being subsumed by a second order clade, which is subsumed by a first order clade.

[0044] FIG. 4 illustrates a model of the influenza antigen-antibody interaction space.

[0045] FIG. 5 depicts the probabilities of conserved epitopes by categories (i.e., universal, 90% of strains, all H1 strains, all H3 strains, 90% of all H1 strains, and 90% of all H3 strains).

[0046] FIG. 6 illustrates a concentration conservation coupling vaccination strategy that can shift epitope conservation distribution

[0047] FIG. 7 illustrates ELISA signals indicating a swarm effect observed on inoculating pigs with a vaccine as described herein.

[0048] FIG. 8 illustrates ELISA signal per HA class after inoculating a cohort of pigs three times with a vaccine as described herein.

[0049] FIGS. 9A-9B illustrate ELISA signal % max and fold change after inoculating a cohort of pigs three times with a vaccine as described herein. FIG. 9A illustrates % max OD 450 nm for Vehicle-control, BIV, C3-500, C3-100, and C3-50 after 3^{rd} immunization. FIG. 9B illustrates Log 2 fold change (% max OD 450 nm) for Vehicle-control, BIV, C3-500, C3-100, and C3-50 after 3^{rd} immunization.

[0050] FIG. 10 illustrates a heatmap showing serum titers after a second boost of a vaccine composition on a panel of antigen variants for each member of each cohort.

[0051] FIG. 11 illustrates a peripheral B cell repertoire occupied by top clonotypes separated by isotype. IGHG results are shown in the top row for vehicle control (top left), BIV (top middle), and C3-50 (top right). IGHM results are shown in the top row for vehicle control (bottom left), BIV (bottom middle), and C3-50 (bottom right).

[0052] FIG. 12 illustrates a sequence alignment of broadly neutralizing pig monoclonal antibody 9C5 isolated through phage display.

[0053] FIG. 13 illustrates minimum antibody concentrations of three broadly neutralizing human (CR9114, F10, and C05) and one broadly neutralizing pig antibody (9C5) sufficient for in vitro neutralization of a panel of 5 influenza A strains.

[0054] FIGS. 14A-14D illustrate data showing a conservation concentration coupling approach can yield serum with improved strain coverage and neutralization breadth compared to a bivalent control. FIG. 14A provides ELISA signals (% max OD450 nm) of pig sera from the first in vivo study to 30 HA antigens (H1, H2, H3, H5, H6, H7, and H17 spanning 1918-2014) across immunization cohorts (each n=7 pigs) of C3-50 (30 HAs at 50 ng/HA), BIV cohort (H1N1 2007 and H3N2 1997 each at 5,000 ng) and vehicle control (PBS+squalene). FIG. 14B provides neutralization breadth shown as average number of strains neutralizing per pig by cohort and as number of positive tests per cohort are shown as scatterplot. FIG. 14C provides neutralization strength for study #2 reported as reciprocal neutralizing dilution per strain across cohorts using bar charts. Bars indicate the mean across all pigs (n=4) of a cohort and error bars indicate standard deviation. “Future” strains tested that are not part of the 2008 C3 formulation are indicated by arrows. FIG. 14D provides neutralization strength for study #3 reported as reciprocal neutralizing dilution per strain across cohorts using bar charts. Bars indicate the mean across all pigs (n=5) of a cohort and error bars indicate standard deviation. Points show the individual value per pig. “Future” strains tested that are not part of the 2008 C3 formulation are indicated by arrows.

### DETAILED DESCRIPTION

[0055] Rapidly evolving pathogens can pose a fundamental challenge to vaccine design, as mutations in such pathogens can render previous vaccine responses obsolete. For example, annual influenza vaccine redesigns can attempt to anticipate evolved influenza variants that may be in common circulation in the following year. Such attempts can often be unsuccessful. Conserved epitopes on the influenza coat proteins which have been identified can be missed by the antibodies elicited by most vaccine recipients.

[0056] Provided herein are immune-generating compositions (e.g., vaccines) that can elicit responses against one or more pathogens. In some cases, vaccines provided herein incorporate antigens that can elicit an immune response that can yield broadly neutralizing antibodies. The present disclosure also provides methods for using and making vaccines as provided herein.

[0057] Broadly neutralizing antibodies can provide for “universal” or longer-term vaccines. Such broadly neutralizing antibodies can be against a broadly conserved residue, for example, a residue of an antigen. A broadly conserved antigen can be conserved over multiple strains of a microbe. Microbes, even rapidly mutating pathogens, can comprise broadly conserved antigens. Antibodies that can identify and/or bind these conserved antigens or sets of antigens can confer protection against many strains of a given virus.

[0058] Since non-conserved residues can be immunodominant because they can be more abundant (e.g., vastly more abundant) than broadly conserved residues, this disclosure provides an approach that can shift the distribution of abundance of the residues of antigens to favor responses to more conserved antigens. By incorporating broadly conserved antigens representing a spectrum of variations of a microbe (e.g., mutants, different strains, or different clades) into vaccines, immunity can be conferred to a subject to many or substantially all variations of a microbe.

### I. Microbes

[0059] A vaccine composition as described herein can elicit an immune response against a microbe, or against a strain or subset of strains of a microbe. In some cases, such vaccines can provide broad immunity (immunity not limited to a particular strain) to a plurality of strains of a microbe. Such vaccines can comprise a set of antigens, which can comprise several or many different antigens from several or many different strains of a microbe.

[0060] A microbe can be an agent that a subject can be vaccinated against. In some cases, a microbe can be pathogenic, or can lead to a disease, a condition, or death. A microbe can be a bacterium, a virus, a fungus, a parasite, or a derivative thereof, such as a nucleic acid, protein, toxin, or peptide secreted by or isolated from a microbe.

[0061] A bacterium can be a single-celled prokaryotic microorganism. A bacterium can be a gram positive bacterium or a gram negative bacterium. A bacterium can be infectious.

[0062] A fungus can be a spore producing organism. A fungus can cause disease in a subject on the skin, in the lungs, in the blood, or another organ, tissue, or biological fluid. In some cases, a fungus can be from the genus Aspergillus, Blastomyces, Candida, Coccidioides, or Cryptococcus (e.g., C. neoformans and C. gattii). Other suitable fungi are also within the scope of the present disclosure.

[0063] A parasite can be a protozoa, a helminth, an ectoparasite, or any other suitable parasite. In some cases, a parasite can be a Plasmodium parasite. In some cases, a parasite can be a Plasmodium parasite or a Trypanosoma parasite. In the case of a Plasmodium parasite, the vaccine might be against a malaria parasite. In the case of a Trypanosoma parasite, the vaccine might be against a Chagas parasite, a Sleeping Sickness parasite, or a Leishmaniasis parasite.

[0064] A protozoa can be a one-celled organism that can live and/or multiply in the blood or tissue of a subject. Examples of protozoa can include, but are not limited to, Sarcodina (e.g., Entamoeba), mastigophore (e.g., Giardia and Leishmania), ciliophoran (e.g., Balantidium), and sporozoan (e.g., Plasmodium, Cryptosporidium, etc.).

[0065] A helminth can be a multicellular organism. Helminths can be divided into three groups: platyhelminths, acanthocephalins, and nematodes. Examples of helminths can include, but are not limited to, parasitic flatworms, flukes, tapeworms, thorny-headed worms, roundworms, and pinworms. Helminths can live in a gastrointestinal tract, blood, lymphatic system, or other tissue.

[0066] An ectoparasite can be an organism that can live on the surface of a subject, and in some cases, can attach or burrow into the skin of a subject. Examples of ectoparasites can include ticks, fleas, lice, and mites.

[0067] In some instances, a virus can be a lentivirus, a flavivirus, a filovirus, a coronavirus, or a paramyxovirus. In the case of a lentivirus, the vaccine might be against a human immunodeficiency (HIV) virus. In the case of a flavivirus, the vaccine might be against a Dengue virus, a Zika virus, or a West Nile virus. In the case of a filovirus, the vaccine might be against an Ebola virus, a Marburg virus, or a Ravn virus. In the case of a coronavirus, the vaccine might be against a Middle East Respiratory Syndrome (MERS) virus, a Severe Acute Respiratory Syndrome (SARS) virus, or a novel coronavirus (e.g., 2019-nCoV). In the case of a paramyxovirus, the vaccine might be against a Respiratory Syncytial Virus (RSV) or a Nipah virus.

[0068] A vaccine can be against a flu virus of any type, such as, but not limited to, any one or more of the flu viruses described herein. A flu virus can be influenza type A, influenza type B, influenza type C, or influenza type D. Influenza A viruses can be divided into subtypes based on two proteins on the surface of the virus: hemagglutinin (HA) and neuraminidase (NA). Different flu strains can have different subtypes of hemagglutinin, neuraminidase, or both. There can be at least 198 predicted influenza A subtype combinations. Influenza B viruses can be further classified into lineages, which can include, for example, B/Yamagata and B/Victoria.

[0069] If a virus is a type A flu virus, it may be of any subtype, including, but not limited to, H1N1, H1N2, H1N3, H2N2, H3N2, H3N8, H4N2, H4N4, H4N6, H4N8, H5N1, H5N2, H5N3, H5N8, H6N1, H6N4, H6N5, H6N6, H6N8, H7N1, H7N2, H7N3, H7N7, H7N8, H7N9, H8N4, H9N2, H9N5, H9N8, H10N3, H10N4, H10N7, H10N8, H10N9, H11N2, H11N6, H11N9, H12N1, H12N3, H12N5, H13N6, H13N8, H14N5, H15N2, H15N8, H16N3, H17N, H18N11, or a variant thereof. If a virus is a type B flu virus, it can be any strain of type B flu virus or a variant thereof. A non-limiting list of flu viruses is included in Table 1.

[0070] A flu virus can be of a strain listed in Table 1. Some vaccines can comprise a set of antigens that can activate an immune response in a subject to at least 80% of strains in Table 1. In some instances, a vaccine can comprise a set of antigens that can activate an immune response in a subject to at least 10%, at least 15%, at least 20%, at least 25%, at least 30%, at least 40%, at least 45%, at least 50%, at least 55%, at least 60%, at least 65%, at least 70%, at least 75%, at least 80%, at least 85%, at least at least 90%, at least at least 95%, at least at least 99%, or 100% of the strains in Table 1.

TABLE 1
Flu virus strains

| | |
|---|---|
| H1N1 | A/Albany/12/1951 |
| | A/Beijing/22808/2009 |
| | A/Beijing/262/1995 |
| | A/Brevig Mission/1/1918 |
| | A/Brisbane/59/2007 |
| | A/California/04/2009 |
| | A/California/06/2009 |
| | A/California/07/2009 |
| | A/Chile/1/1983 |
| | A/England/195/2009 |
| | A/England/42/1972 |
| | A/New Caledonia/20/1999 |
| | A/New York/06/2009 |
| | A/New York/1/1918 |
| | A/New York/18/2009 |
| | A/New Jersey/8/1976 |
| | A/Ohio/07/2009 |
| | A/Ohio/UR06-0091/2007 |
| | A/Puerto Rico/8/1934 |
| | A/Puerto Rico/8/34/Mount Sinai |
| | A/Solomon Islands/3/2006 |
| | A/swine/Belgium/1/1998 |
| | A/Swine/Wisconsin/136/1997 |
| | A/Taiwan/01/1986 |
| | A/Texas/05/2009 |
| | A/Texas/36/1991 |
| | A/USSR/90/1977 |
| | A/USSR/92/1977 |
| | A/WSN/1933 |
| H1N2 | A/swine/Guangxi/13/2006 |
| H1N3 | A/duck/NZL/160/1976 |
| H2N2 | A/Ann Arbor/6/1960 |
| | A/Canada/720/2005 |
| | A/Guiyang/1/1957 |
| | A/Japan/305/1957 |
| H3N2 | A/Aichi/2/1968 |
| | A/Babol/36/2005 |
| | A/Brisbane/10/2007 |
| | A/California/7/2004 |
| | A/Chiang Rai/277/2011 |
| | A/Christchurch/4/1985 |
| | A/Fujian/411/2002 |
| | A/Guangdong-Luohu/1256/2009 |
| | A/Hong Kong/1/1968 |
| | A/Hong Kong/CUHK31987/2011 |
| | A/Indiana/07/2012 |
| | A/Memphis/1/68 |
| | A/Moscow/10/1999 |
| | A/New York/55/2004 |
| | A/Perth/16/2009 |
| | A/reassortant/IVR-155 |
| | A/Sydney/5/1997 |
| | A/Texas/50/2012 |
| | A/Victoria/208/2009 |
| | A/Victoria/210/2009 |
| | A/Victoria/3/1975 |
| | A/Victoria/361/2011 |
| | A/Wisconsin/15/2009 |
| | A/Wisconsin/67/X-161/2005 |
| | A/Wyoming/03/2003 |
| | A/X-31 |
| H3N8 | A/canine/New York/145353/2008 |
| | A/equine/Gansu/7/2008 |
| H4N2 | A/duck/Hunan/8-19/2009 |
| H4N4 | A/mallard duck/Alberta/299/1977 |
| H4N6 | A/mallard/Ohio/657/2002 |
| | A/Swine/Ontario/01911-1/99 |
| H4N8 | A/chicken/Alabama/1/1975 |
| H5N1 | A/Anhui/1/2005 |
| | A/bar-headed goose/Qinghai/14/2008 |
| | A/bar-headed goose/Qinghai/1A/2005 |
| | A/barnswallow/Hong Kong/D10-1161/2010 |
| | A/Cambodia/R0405050/2007 |
| | A/Cambodia/S1211394/2008 |
| | A/chicken/Egypt/2253-1/2006 |
| | A/chicken/India/NIV33487/2006 |
| | A/chicken/Jilin/9/2004 |
| | A/chicken/VietNam/NCVD-016/2008 |
| | A/chicken/Yamaguchi/7/2004 |
| | A/Common magpie/Hong Kong/2256/2006 |
| | A/common magpie/Hong Kong/5052/2007 |
| | A/Duck/Hong Kong/p46/97 |
| | A/duck/Hunan/795/2002 |
| | A/duck/Laos/3295/2006 |
| | A/Egypt/2321-NAMRU3/2007 |
| | A/Egypt/3300-NAMRU3/2008 |
| | A/Egypt/N05056/2009 |
| | A/goose/Guangdong/1/96 |
| | A/goose/Guiyang/337/2006 |
| | A/Hong Kong/213/03 |
| | A/Hong Kong/483/97 |
| | A/Hubei/1/2010 |
| | A/Hubei/2011 |
| | A/Hubei/2011-CDC |
| | A/Indonesia/5/2005 |
| | A/Japanese white-eye/Hong Kong/1038/2006 |
| | A/Thailand/1(KAN-1)/2004 |
| | A/turkey/Turkey/1/2005 |
| | A/Vietnam/UT31413II/2008 |
| | A/whooper swan/Mongolia/244/2005 |
| | A/Xinjiang/1/2006 |
| H5N2 | A/American green-winged teal/California/HKWF609/07 |
| | A/ostrich/South Africa/AI1091/2006 |
| H5N3 | A/duck/Hokkaido/167/2007 |
| H5N8 | A/breeder duck/Korea/Gochang1/2014 |
| | A/broiler duck/Korea/Buan2/2014 |
| | A/duck/Jiangsu/k1203/2010 |
| | A/duck/NY/191255-59/2002 |
| | A/duck/Zhejiang/6D18/2013 |
| | A/duck/Zhejiang/W24/2013 |
| | A/turkey/Ireland/1378/1983 |
| H5N9 | A/chicken/Italy/22A/1998 |
| H6N1 | A/northern shoveler/California/HKWF115/2007 |
| H6N4 | A/chicken/HongKong/17/77 |
| H6N5 | A/shearwater/Australia/1/1973 |
| H6N6 | A/duck/Eastern China/11/2009 |
| H6N8 | A/mallard/Ohio/217/1998 |
| H7N1 | A/turkey/Italy/4602/99 |
| H7N2 | A/ruddy turnstone/New Jersey/563/2006 |
| H7N3 | A/chicken/SK/HR-00011/2007 |
| | A/turkey/Italy/214845/2002 |
| H7N7 | A/chicken/Netherlands/1/03 |
| | A/equine/Kentucky/1a/1975 |
| | A/Netherlands/219/2003 |
| H7N8 | A/mallard/Netherlands/33/2006 |
| H7N9 | A/Anhui/1/2013 |
| | A/Anhui/PA-1/2013 |
| | A/chicken/Zhejiang/DTID-ZJU01/2013 |
| | A/Hangzhou/1/2013 |
| | A/Hangzhou/3/2013 |
| | A/Huzhou/10/2013 |
| | A/Pigeon/Shanghai/S1069/2013 |
| | A/Shanghai/1/2013 |
| | A/Shanghai/4664T/2013 |
| | A/Shanghai/Patient3/2013 |
| | A/Zhejiang/1/2013 |
| | A/Zhejiang/DTID-ZJU10/2013 |
| H8N4 | A/pintail duck/Alberta/114/1979 |
| H9N2 | A/brambling/Beijing/16/2012 |
| | A/Chicken/Hong Kong/G9/1997 |
| | A/duck/Hong Kong/448/78 |
| | A/Guinea fowl/Hong Kong/WF10/99 |
| | A/Hong Kong/1073/99 |
| | A/Hong Kong/2108/2003 |
| | A/Hong Kong/3239/2008 |
| | A/Hong Kong/35820/2009 |
| H9N5 | A/shorebird/DE/261/2003 |
| H9N8 | A/chicken/Korea/164/04 |
| H10N3 | A/duck/Hong Kong/786/1979 |
| | A/duck/Hunan/S11205/2012 |
| | A/mallard/Minnesota/Sg-00194/2007 |
| H10N4 | A/mink/Sweden/3900/1984 |
| H10N7 | A/blue-winged teal/Louisiana/Sg-00073/2007 |
| H10N8 | A/duck/Guangdong/E1/2012 |
| | A/Jiangxi-Donghu/346/2013 |
| H10N9 | A/duck/Hong Kong/562/1979 |
| | A/duck/HongKong/562/1979 |
| H11N2 | A/duck/Yangzhou/906/2002 |
| | A/thick-billed murre/Newfoundland/031/2007 |
| H11N6 | A/duck/England/1/1956 |
| H11N9 | A/mallard/Alberta/294/1977 |
| H12N1 | A/mallard duck/Alberta/342/1983 |
| H12N3 | A/bar headed goose/Mongolia/143/2005 |
| H12N5 | A/green-winged teal/ALB/199/1991 |
| H13N6 | A/black-headed gull/Sweden/1/1999 |
| H13N8 | A/black-headed gull/Netherlands/1/00 |
| H14N5 | A/Mallard/Astrakhan(Gurjev)/263/1982 |
| H15N2 | A/Australian shelduck/Western Australia/1756/1983 |
| H15N8 | A/duck/AUS/341/1983 |
| H16N3 | A/black-headed gull/Sweden/5/99 |
| H17N10 | A/little yellow-shouldered bat/Guatemala/164/2009 |
| H18N11 | A/flat-faced bat/Peru/033/2010 |
| Influenza B | B/Brisbane/3/2007 |
| | B/Brisbane/60/2008 |
| | B/Florida/07/2004 |
| | B/Florida/4/2006 |
| | B/Hong Kong/05/1972 |
| | B/Malaysia/2506/2004 |
| | B/Massachusetts/03/2010 |
| | B/Ohio/01/2005 |
| | B/PHUKET/3073/2013 |
| | B/Utah/02/2012 |
| | B/Victoria/02/1987 |
| | B/Victoria/504/2000 |
| | B/Wisconsin/01/2012 |
| | B/Yamagata/16/1988 |

[0071] A flu vaccine can comprise 2, 3, 4, 5, 6, 7, 8, 9, 10, 11, 12, 13, 14, 15, or more antigens per hemagglutinin antigen class (i.e., H1, H2, H3, etc.)

[0072] A vaccine can be against an HIV virus of any species, for example, HIV-1 and HIV-2. HIV-1 can be of group M (main), group 0 (outlier), or group N (non-M or O). HIV-1 group M can be of subtype A, B, C, D, F, G, H, J, or another subtype. HIV-2 can be of subtype A or subtype B. In some cases, a vaccine against HIV can be against one of HIV-1 or HIV-2. In some cases, a vaccine against HIV can be against both HIV-1 and HIV-2.

[0073] A vaccine can be against a variant of HIV or in some cases against simian immunodeficiency virus (SIV). In some cases, a vaccine against HIV can also be against SW. In some cases, a vaccine against HIV can also offer protection against a variant of SW.

[0074] An HIV virus can be of a strain listed in SEQ ID NOS: 172-267. Some vaccines can comprise a set of antigens that can activate an immune response in a subject to at least 80% of strains in SEQ ID NOS: 172-267. In some instances, a vaccine can comprise a set of antigens that can activate an immune response in a subject to at least 10%, at least 15%, at least 20%, at least 25%, at least 30%, at least 35%, at least 40%, at least 45%, at least 50%, at least 55%, at least 60%, at least 65%, at least 70%, at least 75%, at least 80%, at least 85%, at least at least 90%, at least 95%, at least 99%, or 100% of the strains in SEQ ID NOS: 172-267.

[0075] A microbe can have variants. A variant of a microbe can comprise a microbe having a variation in its genome, a microbe having a variation in its post-translational modification, a microbe having a variation in its epigenome, a microbe having a variation in its protein expression, a microbe having a variation in its RNA expression, a microbe having a variation in its antigen content, or a combination thereof. In some cases, a microbe having a variation in its antigen content can be of particular interest.

[0076] A microbe can have a plurality of variants which can be represented using a phylogenic tree. A phylogenic tree can be a model or a tool, which can be used to explore relationships. In some cases, a phylogenetic tree can be a diagrammatic representation of phylogeny, or evolutionary history, in the sense of a minimally connected graph. A phylogenic tree can comprise a number of clades, wherein a clade can be a grouping of nested branches. A clade can be a grouping that includes a common ancestor and all the descendants (living and extinct) of that ancestor. Examples of clades in a phylogenic tree are provided in FIG. 1. Examples of groupings in a phylogenetic tree that do not comprise clades are also provided in FIG. 1. A vaccine can comprise antigens that are representative of clades of a microbe.

[0077] A group of microbes can be divided into clades, or groups in a phylogenetic tree. In some cases, a phylogenetic tree can be an organization of microbes that can indicate how closely related individual microbes are to one another.

[0078] Clades can be arranged based on similarity of one or more sequences of antigens of the microbes. Clades and subclades on a phylogenetic tree can be shown as groups that have similar genetic changes, such as nucleotide or amino acid changes, and have a single common ancestor (e.g., a common node or branch).

[0079] Clades that are genetically different can be antigenically different. Antigenically different clades can refer to clades whose members have differences that can impact immunity in a subject.

[0080] A clade can be a clade of a phylogenic tree which can be a neighbor-joining clustering tree or a maximum parsimony tree. In some cases, a phylogenic tree can be modeled by a Bayesian model, a maximum likelihood model, a weighted pair group method with arithmetic mean (WPGMA), or an unweighted pair group method with arithmetic mean (UPGMA). A phylogenetic tree as provided herein can also be modeled by other suitable statistical models. A neighbor-joining clustering tree can be created using an agglomerative clustering method. A maximum parsimony tree can be created to minimize the total number of character state changes.

[0081] A clade can comprise nodes and branches. A node can be a point or vertex on a phylogenetic tree that can represent the split of one lineage of a microbe to form two or more lineages (e.g., an internal node within a phylogenetic tree) or the lineage at the present time (e.g., a terminal node). A branch can be a line on a phylogenetic tree that can be used to represent a lineage, whether ancestral or terminal.

[0082] A clade can be a node-based clade, a branch-based clade, or an apomorphy-based clade. A node-based clade can be a clade originating from a particular node on a phylogenic tree and can encompass that node and the branches and nodes descending from that node. An example of a node-based clade is illustrated in the top panel of FIG. 2. A branch-based clade can be a clade originating from a particular branch on a phylogenic tree and can encompass that branch and the branches and nodes descending from that branch. An example of a branch-based clade is illustrated in the middle panel of FIG. 2. In some cases, a clade can be an apomorphy-based clade. An apomorphy-based clade can be a clade originating from an ancestor in which a particular character state, for example, a sequence or structure feature originated. An example of an apomorphy-based clade is illustrated in the bottom panel of FIG. 2. The horizontal line in the apomorphy-based clade illustrated in FIG. 2 indicates where a particular character state occurred.

[0083] In some cases, a clade can be a clade of a phylogenic tree which can be a rooted tree, an unrooted tree, or a bifurcating tree. A phylogenic tree can be a rooted tree if any unique node can correspond to the most recent common ancestor of all entities on the tree. A phylogenic tree can be an unrooted tree if it can be created without making any substantial assumptions about ancestry. A phylogenic tree can be a bifurcating tree if each node has exactly two descendants.

[0084] A clade can be described by its order. The order of a clade can be a description of how many clades it subsumes. A clade of order X can subsume clades of order X+1. For example, a clade of order 1 can subsume clades of order 2, 3, 4, etc., and a clade of order 2 can subsume clades of order 3, 4, 5, etc. An illustration of a first order clade, a second order clade, and a third order clade in the same phylogenic tree is provided in FIG. 3. Here, the first order clade subsumes the second order clade, and the second order clade subsumes the third order clade.

[0085] Likewise, a clade of order Y can be subsumed by a clade of order Y−1. For example, a clade of order 5 can be subsumed by a clade of order 4, a clade of order 6 can be subsumed by a clade of order 5, and a clade of order 7 can be subsumed by a clade of order 6, etc.

[0086] If a clade is an X-order clade, then the X-order clade may be phylogenetically below X−1 branch nodes in a phylogenic tree of the microbe. For example, a clade of order 5 can be phylogenetically below 4 branch nodes, a clade of order 6 can be phylogenetically below 5 branch nodes, and a clade of order 7 can be phylogenetically below 6 branch nodes.

[0087] A clade of a microbe can be first order, second order, third order, fourth order, fifth order, sixth order, seventh order, eighth order, ninth order, tenth order, eleventh order, twelfth order, thirteenth order, fourteenth order, fifteenth order, or any other suitable order. If a clade is a first order clade, then that clade can be not be subsumed in whole or in part within another higher-level clade.

[0088] For example, flu subtypes (e.g., influenza type A) can be broken down into different genetic clades and sub-clades. A flu clade can be a subdivision of flu viruses based on the similarity of a gene sequence of the flu viruses (e.g., hemagglutinin sequences).

[0089] As another example, HIV subtypes (e.g., HIV-1 and/or HIV-2) can be broken down into different genetic clades and sub-clades. An HIV clade can be a subdivision of HIV viruses based on the similarity of a gene sequence of the HIV viruses (e.g., the env gene, which encodes the gp160 protein).

### II. Antigens

[0090] A vaccine composition as described herein can comprise antigens. Antigens in a vaccine composition can be of a microbe or a strains of a microbe that the vaccine composition can elicit an immune response against.

[0091] An antigen can be a molecule that can be recognized by the immune system, which can include antibodies, B cells and/or T cells. For example, an antigen can be a foreign substance that can induce an immune response. In some cases, the induced immune response can comprise the production of antibodies. In some cases, an antibody can recognize, attach to, or bind to an antigen.

[0092] An antigen can be any antigenic determinant on an immunogen, for example, any primary immunogen, to which an antibody binds through an antigenic binding site. Determinants or antigenic determinants on an antigen generally consist of chemically active surface groupings of molecules such as amino acids or sugar side chains and generally have specific three-dimensional structural characteristics, as well as specific charge characteristics.

[0093] An antigen can be a neoantigen, an autoantigen, an endogenous antigen, an exogenous antigen, a viral antigen, a bacterial antigen, a fungal antigen, a parasitic antigen, a toxin, or a tumor antigen. Some vaccines can comprise antigens from one source, while some vaccines can comprise antigens from two, three, four, or more sources.

[0094] A vaccine can comprise an antigen of a strain in Table 1. Some vaccines can comprise one or more homologues of one or more antigens of strains in Table 1. In some cases, such a homologue can comprise at least 80%, at least 85%, at least 90%, at least 95%, or at least 99% sequence identity to an antigen in Table 1.

[0095] An antigen can be a flu antigen. In some cases, a flu antigen can be hemagglutinin or neuraminidase. In some cases, a flu antigen can be a fragment of, a derivative of, or a modified hemagglutinin or neuraminidase. In certain cases, a vaccine can comprise a combination of hemagglutinin and neuraminidase, or fragments, derivatives, or modified versions thereof. In various cases, an antigen can be a hemagglutinin-neuraminidase combined protein, or a fragment, derivative, or modified version thereof.

[0096] Hemagglutinin can be a homotrimeric glycoprotein that can be found on the surface of a flu virus. Hemagglutinin can be a class 1 fusion protein, and can have multifunctional activity as an attachment factor and/or a membrane fusion protein. In some cases, hemagglutinin can play a role in binding a flu virus to sialic acid on the surface of a target or host cell. After this binding, a flu virus can be internalized. In some cases, hemagglutinin can play a role in the fusion of the viral envelope of a flu virus with a late endosomal membrane in a low pH (e.g., 5.0-5.5) environment.

[0097] Hemagglutinin can be of a type A or a type B flu virus. Hemagglutinin can have a structure comprising a head and a stem, and can comprise three identical monomers. A monomer can comprise an intact HA0 single polypeptide chain with HA1 and HA2 regions that can be linked by two disulfide bridges. An HA2 region can have an alpha helical coiled coil structure, and can sit on top of an HA1 region. An HA1 region can be a small globular domain that can comprise a mix of a/13 structures.

[0098] A vaccine composition can comprise a head of hemagglutinin, a stem of hemagglutinin, or a combination or fragment thereof. In some cases, a vaccine composition can comprise a broadly conserved fragment of hemagglutinin, a broadly conserved fragment of a head of hemagglutinin, a broadly conserved fragment of a stem of hemagglutinin, or a combination thereof. A broadly conserved sequence can be an amino acid sequence or a nucleic acid sequence that can be identical or similar across species or strains of a microbe.

[0099] A vaccine composition can comprise an HA0 region, an HAL an HA2, region, or a combination or fragment thereof. A hemagglutinin antigen can be of a subtype of hemagglutinin. For example, hemagglutinin in a type A flu virus hemagglutinin antigen can be of 18 or more subtypes. Subtypes of hemagglutinin can be H1, H2, H3, H4, H5, H6, H7, H8, H9, H10, H11, H12, H13, H14, H15, H16, H17, or H18.

[0100] Some vaccine compositions can comprise at least 5, at least 10, at least 20, or at least 30 influenza virus hemagglutinin antigen polypeptides. Such a hemagglutinin antigen polypeptide can be represented by a sequence (e.g., an amino acid sequence) that is at least 20% identical, but not more than 95% identical, to the other polypeptides in the vaccine, wherein each polypeptide comprises a target segment that is at least 90% identical among the influenza virus hemagglutinin antigen polypeptides. In some cases, such a hemagglutinin antigen polypeptide can be represented by a sequence (e.g., an amino acid sequence) that is at least 20% identical, but not more than 95% identical, to the other polypeptides in the vaccine. In certain cases, such a hemagglutinin antigen polypeptide can be represented by a sequence (e.g., an amino acid sequence) that is at least 10% identical, but not more than 95% identical, to the other polypeptides in the vaccine. In various cases, such a hemagglutinin antigen polypeptide can be represented by a sequence (e.g., an amino acid sequence) that is at least 20% identical, but not more than 98% identical, to the other polypeptides in the vaccine. In some cases, such a hemagglutinin antigen polypeptide can be represented by a sequence (e.g., an amino acid sequence) that is at least 10% identical, but not more than 98% identical, to the other polypeptides in the vaccine.

[0101] Neuraminidase can be a protein found on the surface of a flu virus. Neuraminidase can enable flu virus to be released from a host cell. Neuraminidase can be a member of the glycoside hydrolase family 34. Neuraminidase can be a mushroom shaped protein. Neuraminidase can comprise a head portion, which can comprise four co-planar and roughly spherical subunits and a hydrophobic region. In some cases, the hydrophobic region can be embedded within the interior of a viral membrane. Neuraminidase can comprise a single polypeptide chain. A neuraminidase polypeptide can be a single chain of six conserved polar amino acids, which can be followed by variable amino acids.

[0102] A vaccine can comprise a spherical subunit of neuraminidase, a hydrophobic region of neuraminidase, or a combination thereof. In some cases, a vaccine composition can comprise a broadly conserved fragment of neuraminidase, a broadly conserved fragment of a spherical subunit of neuraminidase, a broadly conserved fragment of a hydrophobic region of neuraminidase, or a combination thereof.

[0103] In some cases, a neuraminidase antigen can be of a subtype of neuraminidase. A flu virus neuraminidase antigen can be of 11 or more subtypes. Subtypes of neuraminidase can be N1, N2, N3, N4, N5, N6, N7, N8, N9, N10, or N11. In some cases, a neuraminidase antigen can be of a virus that is not a flu virus. In some cases, a neuraminidase can be of a bacterium. For example, neuraminidase can be of Bacteroides fragilis or Pseudomonas aeruginosa or another bacterium.

[0104] Some vaccine compositions can comprise at least 5, at least 10, at least 20, or at least 30 influenza virus neuraminidase antigen polypeptides. Such a neuraminidase antigen polypeptide can be represented by a sequence (e.g., an amino acid sequence) that is at least 20% identical, but not more than 95% identical, to the other polypeptides in the vaccine, wherein each polypeptide comprises a target segment that is at least 90% identical among the influenza virus neuraminidase antigen polypeptides. In some cases, such a neuraminidase antigen polypeptide can be represented by a sequence (e.g., an amino acid sequence) that is at least 20% identical, but not more than 95% identical, to the other polypeptides in the vaccine. In certain cases, such a neuraminidase antigen polypeptide can be represented by a sequence (e.g., an amino acid sequence) that is at least 10% identical, but not more than 95% identical, to the other polypeptides in the vaccine. In various cases, such a neuraminidase antigen polypeptide can be represented by a sequence (e.g., an amino acid sequence) that is at least 20% identical, but not more than 98% identical, to the other polypeptides in the vaccine. In some cases, such a neuraminidase antigen polypeptide can be represented by a sequence (e.g., an amino acid sequence) that is at least 10% identical, but not more than 98% identical, to the other polypeptides in the vaccine.

[0105] An antigen can be an HIV antigen. In some cases, an HIV antigen can be the glycoprotein gp160. In some cases, an HIV antigen can be a fragment of, a derivative of, or a modified gp160. In certain cases, a vaccine can comprise a combination of gp160, or fragments, derivatives, or modified versions thereof.

[0106] Gp160 can be a protein encoded by the env gene in the HIV virus that can form a homotrimer and can be found on the surface of an HIV virus. Gp160 can be cleaved into gp120 and gp41 by a protease such as furin in a subject. Gp120 and gp41 can be transported to the plasma membrane of the host cell of the subject, where gp41 can anchor gp120 to the membrane of the infected cell. In some cases, gp120 can be an antigen. In some cases, gp41 can be an antigen.

[0107] Gp160 can be of HIV-1 or HIV-2. Gp160 can comprise three subunits that can have an outward facing glycoprotein portion attached to a membrane-associated portion. The interface between GP160 subunits can be polar.

[0108] A vaccine composition can comprise a glycoprotein segment of gp160, a membrane-associated portion of gp160, a broadly conserved fragment of gp160, a broadly conserved fragment of a glycoprotein segment of gp160, a broadly conserved fragment of a membrane-associated portion of gp160, or a combination thereof.

[0109] Some vaccine compositions can comprise at least 5, at least 10, at least 20, or at least 30 HIV gp160 antigen polypeptides. Such a gp160 antigen polypeptide can be represented by a sequence (e.g., an amino acid sequence) that is at least 20% identical, but not more than 95% identical, to the other polypeptides in the vaccine, wherein each polypeptide comprises a target segment that is at least 90% identical among the gp160 antigen polypeptides. In certain cases, such a gp160 antigen polypeptide can be represented by a sequence (e.g., an amino acid sequence) that is at least 20% identical, but not more than 95% identical, to the other polypeptides in the vaccine. In various cases, such a gp160 antigen polypeptide can be represented by a sequence (e.g., an amino acid sequence) that is at least 10% identical, but not more than 95% identical, to the other polypeptides in the vaccine. In some cases, such a gp160 antigen polypeptide can be represented by a sequence (e.g., an amino acid sequence) that is at least 20% identical, but not more than 98% identical, to the other polypeptides in the vaccine. In certain cases, such a gp160 antigen polypeptide can be represented by a sequence (e.g., an amino acid sequence) that is at least 10% identical, but not more than 98% identical, to the other polypeptides in the vaccine.

[0110] Gp120 can be of HIV-1 or HIV-2. Gp120 can comprise three subunits that can have an outward facing glycoprotein portion attached to a membrane-associated portion. The interface between GP120 subunits can be polar.

[0111] A vaccine composition can comprise a glycoprotein segment of gp120, a membrane-associated portion of gp120, a broadly conserved fragment of gp120, a broadly conserved fragment of a glycoprotein segment of gp120, a broadly conserved fragment of a membrane-associated portion of gp120, or a combination thereof.

[0112] Some vaccine compositions can comprise at least 5, at least 10, at least 20, or at least 30 HIV gp120 antigen polypeptides. Such a gp120 antigen polypeptide can be represented by a sequence (e.g., an amino acid sequence) that is at least 20% identical, but not more than 95% identical, to the other polypeptides in the vaccine, wherein each polypeptide comprises a target segment that is at least 90% identical among the gp120 antigen polypeptides. In certain cases, such a gp120 antigen polypeptide can be represented by a sequence (e.g., an amino acid sequence) that is at least 20% identical, but not more than 95% identical, to the other polypeptides in the vaccine. In various cases, such a gp120 antigen polypeptide can be represented by a sequence (e.g., an amino acid sequence) that is at least 10% identical, but not more than 95% identical, to the other polypeptides in the vaccine. In some cases, such a gp120 antigen polypeptide can be represented by a sequence (e.g., an amino acid sequence) that is at least 20% identical, but not more than 98% identical, to the other polypeptides in the vaccine. In certain cases, such a gp120 antigen polypeptide can be represented by a sequence (e.g., an amino acid sequence) that is at least 10% identical, but not more than 98% identical, to the other polypeptides in the vaccine.

[0113] Gp41 can be of HIV-1 or HIV-2. Gp41 can comprise three subunits that can have an outward facing glycoprotein portion attached to a membrane-associated portion. The interface between GP41 subunits can be polar.

[0114] A vaccine composition can comprise a glycoprotein segment of gp41, a membrane-associated portion of gp41, a broadly conserved fragment of gp41, a broadly conserved fragment of a glycoprotein segment of gp41, a broadly conserved fragment of a membrane-associated portion of gp41, or a combination thereof.

[0115] Some vaccine compositions can comprise at least 5, at least 10, at least 20, or at least 30 HIV gp41 antigen polypeptides. Such a gp41 antigen polypeptide can be represented by a sequence (e.g., an amino acid sequence) that is at least 20% identical, but not more than 95% identical, to the other polypeptides in the vaccine, wherein each polypeptide comprises a target segment that is at least 90% identical among the gp41 antigen polypeptides. In certain cases, such a gp41 antigen polypeptide can be represented by a sequence (e.g., an amino acid sequence) that is at least 20% identical, but not more than 95% identical, to the other polypeptides in the vaccine. In various cases, such a gp41 antigen polypeptide can be represented by a sequence (e.g., an amino acid sequence) that is at least 10% identical, but not more than 95% identical, to the other polypeptides in the vaccine. In some cases, such a gp41 antigen polypeptide can be represented by a sequence (e.g., an amino acid sequence) that is at least 20% identical, but not more than 98% identical, to the other polypeptides in the vaccine. In certain cases, such a gp41 antigen polypeptide can be represented by a sequence (e.g., an amino acid sequence) that is at least 10% identical, but not more than 98% identical, to the other polypeptides in the vaccine.

[0116] An antigen can be broadly neutralizing. A broadly neutralizing antigen can be identified by a broadly neutralizing antibody. A broadly neutralizing antibody can be an antibody which can affect multiple strains of a virus. Some broadly neutralizing antigens can be of at least 80%, 85%, 90%, 95%, 98%, 99%, or 100% of strains.

[0117] A broadly neutralizing antigen can comprise surface exposed residues adjacent in tertiary space. That is, a broadly neutralizing antigen can be neutralizing based on its surface properties. In some cases, a broadly neutralizing antigen can comprise neutralizing residues on a non-surface region of the antigen, such as in a pocket, in an active site, or in the interior of an antigen.

[0118] An antigen, such as a broadly neutralizing antigen, can be of a flu virus. Such a broadly neutralizing antigen can be located on hemagglutinin. Such a broadly neutralizing antigen can be in a stem of hemagglutinin, in a head of hemagglutinin, or in a portion thereof. In some cases, a broadly neutralizing antigen can be similar to a stem of a hemagglutinin, head of hemagglutinin, or similar to a portion thereof. In some cases, such a portion can be broadly neutralizing. For example, a broadly neutralizing antigen can be at least about 60% similar to, at least about 70% similar to, at least about 80% similar to, at least about 85% similar to, or at least about 90% similar to a head of a hemagglutinin or a stem of a hemagglutinin. In some cases, a broadly neutralizing antigen can be at least about 60% similar to, at least about 70% similar to, at least about 80% similar to, at least about 85% similar to, or at least about 90% similar to a portion of a head of a hemagglutinin or a portion of a stem of a hemagglutinin. In some cases, a broadly neutralizing antigen can be at least about 60% similar to, at least about 70% similar to, at least about 80% similar to, at least about 85% similar to, or at least about 90% similar to a broadly conserved fragment of hemagglutinin, a broadly conserved fragment of a head of a hemagglutinin or a broadly conserved fragment of a stem of a hemagglutinin.

[0119] In some cases, a broadly neutralizing antigen can be located on neuraminidase or a portion thereof. In some cases, a broadly neutralizing antigen can be similar to neuraminidase. For example, a broadly neutralizing antigen can be at least about 60% similar to, at least about 70% similar to, at least about 80% similar to, at least about 85% similar to, or at least about 90% similar to neuraminidase or a portion thereof. In some cases, such a portion can be broadly neutralizing. In some cases, a broadly neutralizing antigen can be at least about 60% similar to, at least about 70% similar to, at least about 80% similar to, at least about 85% similar to, or at least about 90% similar to a portion of neuraminidase. In some cases, a broadly neutralizing antigen can be at least about 60% similar to, at least about 70% similar to, at least about 80% similar to, at least about 85% similar to, or at least about 90% similar to a broadly conserved fragment of neuraminidase.

[0120] A broadly neutralizing antigen can be of an HIV virus. In some cases, a broadly neutralizing antigen can be located on gp160 or a portion thereof. In some cases, a broadly neutralizing antigen can be similar to gp160. For example, a broadly neutralizing antigen can be at least about 30% similar to, at least about 40% similar to, at least about 50% similar to, at least about 60% similar to, at least about 70% similar to, at least about 80% similar to, at least about 85% similar to, or at least about 90% similar to gp160 or a portion thereof. In certain cases, such a portion can be broadly neutralizing. In various cases, a broadly neutralizing antigen can be at least about 60% similar to, at least about 70% similar to, at least about 80% similar to, at least about 85% similar to, or at least about 90% similar to a portion of gp160. In some cases, a broadly neutralizing antigen can be at least about 60% similar to, at least about 70% similar to, at least about 80% similar to, at least about 85% similar to, or at least about 90% similar to a broadly conserved fragment of gp160.

[0121] A broadly neutralizing antigen can be of an HIV virus. In some cases, a broadly neutralizing antigen can be located on gp120 or a portion thereof. In some cases, a broadly neutralizing antigen can be similar to gp120. For example, a broadly neutralizing antigen can be at least about 30% similar to, at least about 40% similar to, at least about 50% similar to, at least about 60% similar to, at least about 70% similar to, at least about 80% similar to, at least about 85% similar to, or at least about 90% similar to gp120 or a portion thereof. In certain cases, such a portion can be broadly neutralizing. In various cases, a broadly neutralizing antigen can be at least about 30% similar to, at least 40% similar to, at least 50% similar to, at least 60% similar to, at least about 70% similar to, at least about 80% similar to, at least about 85% similar to, or at least about 90% similar to a portion of gp120. In some cases, such a portion can be a broadly conserved fragment.

[0122] A broadly neutralizing antigen can be of an HIV virus. In some cases, a broadly neutralizing antigen can be located on gp41 or a portion thereof. In some cases, a broadly neutralizing antigen can be similar to gp41. For example, a broadly neutralizing antigen can be at least about 30% similar to, at least about 40% similar to, at least about 50% similar to, at least about 60% similar to, at least about 70% similar to, at least about 80% similar to, at least about 85% similar to, or at least about 90% similar to gp41 or a portion thereof. In certain cases, such a portion can be broadly neutralizing. In various cases, a broadly neutralizing antigen can be at least about 60% similar to, at least about 70% similar to, at least about 80% similar to, at least about 85% similar to, or at least about 90% similar to a portion of gp41. In some cases, such a portion can be a broadly conserved fragment.

[0123] In some cases, a vaccine can comprise antigens corresponding to more than one microbe. Some vaccines can comprise antigens against two, three, four, five, six, or more microbes. Antigens can each be present in the vaccine at a lower dose than in currently available vaccines. The combination of diverse antigens can allow for B cells and/or T cells which can broadly identify many strains of the microbe, even strains which are not represented in the vaccine. In some cases, this can be referred to as a swarm effect. The swarm effect can reduce the amount of dose of each antigen as well as reduce the total antigen dose required to elicit an immune response. For example, antigens representative of a particular number of clades of a given order of a clade of a microbe can be included in a vaccine. Including representatives of diverse clades may allow the vaccine to be effective against evolutionarily distinct strains. As another example, antigens representative of a particular amount of operational taxonomic units (OTUs) of a microbe can be included in a vaccine. An OTU can be used to classify groups of closely related entities, such as antigens.

[0124] An OTU can be a group of microbes. Microbes in a given OTU can be closely related. An overview of OTUs can be found in Sokal, et al. (Principles of Numerical Taxonomy. W.H. Freeman and Co., San Francisco and London (1963)) and Schloss, et al. (Applied and Environmental Microbiology, October 2006, p. 6773-6779, Vol. 72, No. 10).

[0125] An OTU can refer generally to a cluster of antigens grouped by sequence similarity and can sometimes be a pragmatic proxy for “species” at different taxonomic levels. Administering to a subject a vaccine comprising antigens representing clades of a variety of OTUs can confer immunity across a genetically diverse set of antigens.

[0126] In some cases, an OTU can be based on a particular nucleic acid or amino acid sequence of a microbe. For example, an OTU can be based on a sequence of 16S rRNA or a sequence of a gene encoding 16S rRNA. Such an OTU can be referred to as a 16S OUT. In various cases, an OTU can be based on a sequence of 18S rRNA or a sequence of a gene encoding 18S rRNA.

[0127] An OTU can be a group of microbes having a threshold similarity. For example, an OUT can be a group of microbes having at least 95%, at least 96%, at least 97%, at least 98%, or at least 99% similarity. In some cases, different microbes can have a similarity higher than the threshold. Such microbes can be in a merged OTU, which can contain multiple species. In certain cases, a single species of a microbe can have paralogs that are less similar than the threshold. Such paralogs can be split across two or more OTUs.

[0128] Methods to assign OTUs can include rarefaction curves. Such methods can assess species richness and alpha and beta diversity estimators, implicitly assume that OTUs are observations of organisms with negligible error, and/or the number of observations correlates well with a total number of species or monophyletic groups.

[0129] In some cases, a cluster can be spurious, for example, due to artifacts, such as read errors and/or chimeras. In certain cases, an OTU can be based on a genetic distance between sequences of microbes within the OTU. In various cases, an OTU can provide an estimate of richness and/or diversity of a microbial population. In some instances, microbes belonging to a given OTU can have structural similarities. In certain instances, microbes belonging to different OTUs can have different structures.

[0130] Microbial sequences can be assigned to an OTU using a software or a tool. Examples of such tools include, but are not limited to, the Distance-Based OTU and Richness (DOTUR) tool, a shared OTUs and similarity (SONS) tool, a LIBSHUFF/∫-LIBSHUFF tool, a TreeClimber tool, a UniFrac tool, or an analysis of molecular variance (AMOVA) tool.

[0131] A tool can assign a microbial sequence to an OTU based on an input comprising information of a plurality of microbial sequences. Examples of such inputs can include a distance matrix, a phylogenetic tree, and/or a distance matrix. A DOTUR tool can assign sequences to OTUs by using a furthest, average, or nearest neighbor algorithm for one, several, or each distance level. A DOTUR tool can assign OTUs based on a distance matrix input. A SONS tool can calculate collector's curves for estimates of the fraction and richness of OTUs shared between communities. A SONS algorithm can assign OTUs based on an OTU designation input.

[0132] A LIBSHUFF/∫-LIBSHUFF tool can use a Cramer-von Mises statistic to test whether structures of two communities are the same, different, or subsets of one another. A LIBSHUFF/∫-LIBSHUFF tool can assign OTUs based on a distance matrix input. A TreeClimber tool can implement a parsimony-based test to determine whether the community structures of two or more communities are significantly different. A TreeClimber tool can assign OTUs based on a phylogenetic tree input.

[0133] A UniFrac tool can compare phylogenetic distances between pairs of communities to describe the similarity of their structures. A UniFrac tool can assign OTUs based on a phylogenetic tree input. An AMOVA tool can use an analysis of variance-type formulations to determine whether the genetic diversities of two or more community structures are significantly different. An AMOVA tool can assign OTUs based on a distance matrix input.

[0134] An OTU can refer generally to a cluster of antigens grouped by sequence similarity, and can sometimes be a pragmatic proxy for “species” at different taxonomic levels. Including representative clades of a variety of OTUs can result in conferred across a genetically diverse set of antigens. Each OTU can comprise microbial sequences which are similar. In some cases, each OTU can comprise microbial sequences which are at least 90%, at least 91%, at least 92%, at least 93%, or at least 94% homologous of one another. In some cases, each OTU can comprise microbial sequences which are at least 95%, at least 96%, at least 97%, at least 98%, at least 99% homologous of one another.

[0135] In an even further example, a set of antigens derived from a library of variants such that the set of antigens broadly represents the library of variants can be included. In some cases, a set of antigens derived from a library of variants such that the set of antigens broadly represents at least 80%, at least 90%, at least 95%, at least 96%, at least 97%, at least 98%, at least 99%, at least 99.5%, or at least 99.9% of the library of variants can be included. In some cases, such a set of antigens can additionally represent one or more variants not included in a library of variants.

[0136] An antigen can be a single peptide or protein of interest or a complex of two, three, four, five, six, or more peptides and/or proteins. In some cases, an antigen can refer to an antigen domain, or a region or section of a larger protein or protein complex. In some cases, an antigen can refer to two or more antigen domains or two or more regions or sections of a larger protein or protein complex. In some cases, an antigen may be a whole protein, a fragment of a whole protein, a functional fragment of a whole protein, a peptide, a multimer polypeptide, a polypeptide sequence, or a combination thereof. In some cases, an antigen can be modified (e.g., artificially modified). Such modification can stabilize or improve the antigenicity. Examples of modifications include alterations in a polypeptide sequence (e.g., truncation, lengthening, or mutating). In some cases, an antigen may comprise two or more whole proteins, fragments of whole proteins, functional fragments of whole proteins, peptides, or multimer polypeptides. Sometimes, an antigen can comprise a lipid, a nucleic acid, a polysaccharide, or a combination thereof

[0137] An antigen can be an intact (i.e., an entire or whole) antigen, or a functional portion of an antigen. An antigen can be a peptide functional portion of an antigen. “Intact,” as used herein, generally refers to a full-length antigen as that antigen polypeptide occurs in nature. An intact antigen may adopt the native protein fold as seen in nature, presenting both primary sequence epitopes as well as tertiary sequence conformational epitopes. This can be in direct contrast to delivery of only a small portion or peptide of the antigen. Delivering an intact antigen to a cell can elicit a broad spectrum immune response, rather than an immune response to just a single or select few epitopes. In some cases, one, several, or all of the epitopes on an antigen can be unknown at the time of developing a vaccine or library.

[0138] Alternatively, an antigen can be divided into parts, depending on the size of the initial antigen. Typically, where a whole antigen is a multimer polypeptide, the whole protein can be divided into sub-units and/or domains where each individual subunit or domain of the antigen can be associated with the polymer according to the methods as disclosed herein. In some cases, parts of an antigen can be functional fragments or parts.

[0139] A vaccine can comprise a homolog of an antigen (e.g., a hemagglutinin homolog, a neuraminidase homolog, a gp160 homolog, a gp120 homolog, or a gp41 homolog). A homolog can be a molecule having a shared ancestry with an antigen. In some cases, a homolog of an antigen can be an antigen.

[0140] In some cases, an antigen can be modified. A modification can comprise a truncation, a tag, an addition of amino acids, glycosylation, methylation, ubiquitination, insertion, deletion, mutation, or other modification. For example, HIV env-Glycoprotein Complex (trimer) can be usually artificially mutated e.g. by disulfide bonds that can keep the antigen stable and/or prevent or delay dissociation of HIV env derived proteins. This can include but is not limited to artificial cleaving sites, removal of entire functional regions (e.g. cutting of a transmembrane region)

[0141] In some cases, an antigen can be present at a lower concentration than in currently available vaccines. In some cases, an antigen can be present at a concentration which would be insufficient to induce an immune response if the antigen were administered alone. In some cases, each of the antigens in a vaccine can be present at concentrations which would be insufficient for any of the antigens to induce an immune response if the antigens were administered alone. In such cases, the total antigen concentration, rather than the concentrations of the individual antigens, can be a determining factor for whether or not an immune response is induced. When the total concentration of antigens is a determining factor, the required concentrations of individual antigens can be a function of the total concentration or a function of the number of antigens.

[0142] In some cases, one or more antigens can provide immunity in a subject against a broad plurality of variants of a microbe. For example, an antigen can provide immunity to variants of a microbe that are variants based on year of origin, species of origin, specific mutation, or any other suitable variant.

[0143] Two antigens in a set of antigens can have an edit distance (e.g., pairwise edit distance). An edit distance can describe the differentness of the two antigens. An edit distance can be a Levenshtein distance. A Levenshtein distance between a first antigen and a second antigen can be the fewest number of edits required to change the first antigen into the second antigen. In the calculation of edit distance, allowed edits can comprise an insertion, deletion, and/or substitution. If the first antigen and the second antigen are identical, the Levenshtein distance can be zero. If the first antigen and the second antigen are the same size, the Levenshtein distance can be at most the size of the first antigen. If the first antigen and the second antigen are different in size, the Levenshtein distance can be at least the difference in size between the first antigen and the second antigen.

[0144] Another method of calculating edit distance can be the Longest Common Subsequence method, wherein insertion and deletion can be the only two allowed edits for calculation. Yet another method of calculating edit distance can be the Hamming distance, wherein only antigens of same size may be used.

[0145] A smallest edit distance between two or more antigens can be determined. In some cases, the smallest edit distance can be the smallest edit distance between any two antigens of the two or more antigens. The smallest edit distance can be a measure of the similarity of the two or more most similar antigens in a set.

[0146] A largest edit distance between two or more antigens can be determined. In some cases, the largest edit distance can be the largest edit distance between any two antigens of the two or more antigens. The largest edit distance can be a measure of the similarity of the two or more most different antigens in a set.

[0147] Both the smallest pairwise edit distance between two or more antigens in a set and the largest pairwise edit distance between two or more antigens in a set can be measured or described. The combination of both edit distances can describe the most and least similar antigens in a set, and in some cases, can be a measure of the bounds of variety of antigens in a set.

[0148] An edit distance can be measured as a percentage of the size of the antigens. Herein, the size of the antigens can be the average size of the antigens, the maximum size of the antigens, the minimum size of the antigens, or another measure of the size of the antigens. For example, for an two antigens that are each 100 amino acids in size and have a 5 edit difference, the pairwise edit distance can be represented as 5%.

[0149] A vaccine can comprise a set of antigens of a microbe wherein the smallest pairwise edit distance between the two antigens is less than a particular threshold. A vaccine can comprise a set of antigens wherein the largest pairwise edit distance between two of the antigens is at least a different particular threshold. In some cases, requiring minimum and maximum differences in included antigens can help ensure immunity will be conferred across a variety of antigens with minimal bias.

[0150] A library or vaccine can be described by the difference between the largest edit distance and the smallest edit distance. Two antigens of the set with the greatest edit distance can have an edit distance called “S.” Two antigens of the library with the greatest edit distance can have an edit distance called “L.” The difference between “S” and “L” can indicate a range of differentness of the antigens present in a vaccine. A larger difference can indicate a greater range of differentness, or greater variety, of antigens. In some cases, “S” can be at least 60% of “L,” 70% of “L,” 80% of “L,” or 90% of “L.” In other words, the most different antigen by edit distance in the vaccine composition can be in the top 10%, 20%, 30%, or 40% of different antigens by edit distance in the library.

[0151] The average number of nodes between antigens can be calculated for a given vaccine. In some cases, the average nodes of nodes between each antigen in a set of antigens in a vaccine can be at least 1, at least 3, at least 5, at least 10, at least 15, or at least 20. In some cases, the average number of nodes between each of the antigens can be a function of the number of antigens in a set. Sometimes, the average number of nodes between each of the antigens can be lower if the number of antigens in the set is higher.

[0152] Antigens in a vaccine can be compared using the number of nodes separating them on a phylogenic tree. For example, closely related antigens can be separated by fewer nodes than less closely related antigens. When describing the number of nodes separating two antigens, antigens separated by fewer nodes can be more closely related or more similar in structure or in sequence, while antigens separated by more nodes can be less closely related or less similar in structure or in sequence. In some cases, for example, two antigens in a vaccine can be separated by at least 1, at least 3, at least 5, at least 10, at least 15, or at least 20 nodes.

[0153] The smallest number of nodes between any 2 antigens can be 1 in some vaccines. The largest number of nodes between any two antigens can be at least 5, at least 10, at least 15, or at least 20. In some vaccines, the smallest number of nodes between any 2 antigens can be 1 and the largest number of nodes between any two antigens can be at least 5. In some vaccines, the smallest number of nodes between any 2 antigens can be 1 and the largest number of nodes between any two antigens can be at least 10. In some vaccines, the smallest number of nodes between any 2 antigens can be 1 and the largest number of nodes between any two antigens can be at least 15. In some vaccines, the smallest number of nodes between any 2 antigens can be 1 and the largest number of nodes between any two antigens can be at least 20. In some vaccines, the smallest number of nodes between any 2 antigens can be less than 5 and the largest number of nodes between any two antigens can be at least 5. In some vaccines, the smallest number of nodes between any 2 antigens can be less than 5 and the largest number of nodes between any two antigens can be at least 10. In some vaccines, the smallest number of nodes between any 2 antigens can be less than 5 and the largest number of nodes between any two antigens can be at least 15. In some vaccines, the smallest number of nodes between any 2 antigens can be less than 5 and the largest number of nodes between any two antigens can be at least 20. In some vaccines, the smallest number of nodes between any 2 antigens can be less than 10 and the largest number of nodes between any two antigens can be at least 10. In some vaccines, the smallest number of nodes between any 2 antigens can be less than 10 and the largest number of nodes between any two antigens can be at least 15. In some vaccines, the smallest number of nodes between any 2 antigens can be less than 10 and the largest number of nodes between any two antigens can be at least 20.

[0154] The average number of branches between antigens can be calculated for a given vaccine. In some cases, the average number of branches between each antigen in a set of antigens in a vaccine can be at least 1, at least 3, at least 5, at least 10, at least 15, or at least 20. In some cases, the average number of branches between each of the antigens can be a function of the number of antigens in a set. Sometimes, the average number of branches between each of the antigens can be lower if the number of antigens in the set is higher.

[0155] Antigens in a vaccine can be compared using the number of branches separating them on a phylogenic tree. For example, closely related antigens can be separated by fewer branches than less closely related antigens. When describing the number of branches separating two antigens, antigens separated by fewer branches can be more closely related or more similar in structure or in sequence, while antigens separated by more branches can be less closely related or less similar in structure or in sequence. In some cases, for example, two antigens in a vaccine can be separated by at least 1, at least 3, at least 5, at least 10, at least 15, or at least 20 branches.

[0156] The smallest number of branches between any 2 antigens can be 1 in some vaccines. The largest number of branches between any two antigens can be at least 5, at least 10, at least 15, or at least 20. In some vaccines, the smallest number of branches between any 2 antigens can be 1 and the largest number of branches between any two antigens can be at least 5. In some vaccines, the smallest number of branches between any 2 antigens can be 1 and the largest number of branches between any two antigens can be at least 10. In some vaccines, the smallest number of branches between any 2 antigens can be 1 and the largest number of branches between any two antigens can be at least 15. In some vaccines, the smallest number of branches between any 2 antigens can be 1 and the largest number of branches between any two antigens can be at least 20. In some vaccines, the smallest number of branches between any 2 antigens can be less than 5 and the largest number of branches between any two antigens can be at least 5. In some vaccines, the smallest number of branches between any 2 antigens can be less than 5 and the largest number of branches between any two antigens can be at least 10. In some vaccines, the smallest number of branches between any 2 antigens can be less than 5 and the largest number of branches between any two antigens can be at least 15. In some vaccines, the smallest number of branches between any 2 antigens can be less than 5 and the largest number of branches between any two antigens can be at least 20. In some vaccines, the smallest number of branches between any 2 antigens can be less than 10 and the largest number of branches between any two antigens can be at least 10. In some vaccines, the smallest number of branches between any 2 antigens can be less than 10 and the largest number of branches between any two antigens can be at least 15. In some vaccines, the smallest number of branches between any 2 antigens can be less than 10 and the largest number of branches between any two antigens can be at least 20.

[0157] A vaccine can be described by its sequence identity. As used herein, the terms “identical” or percent “identity,” in the context of two or more nucleic acids or polypeptide sequences, generally refer to two or more sequences or subsequences that are the same or have a specified percentage of amino acid residues or nucleotides that are the same.

[0158] Alternatively, an indication that two nucleic acid sequences or polypeptides are identical is that the polypeptide encoded by the first nucleic acid is immunologically cross reactive with the antibodies raised against the polypeptide encoded by the second nucleic acid, as described below. Thus, a polypeptide is typically identical to a second polypeptide, for example, where the two peptides differ only by conservative substitutions. Another indication that two nucleic acid sequences are substantially identical is that the two molecules or their complements hybridize to each other under stringent conditions, as described herein.

[0159] Alternatively, an indication that two nucleic acid sequences or polypeptides are identical is that the polypeptide encoded by the first nucleic acid is immunologically cross reactive with the antibodies raised against the polypeptide encoded by the second nucleic acid, as described below. Thus, a polypeptide is typically identical to a second polypeptide, for example, where the two peptides differ only by conservative substitutions. Another indication that two nucleic acid sequences are substantially identical is that the two molecules or their complements hybridize to each other under stringent conditions, as described herein.

[0160] Alternatively, an indication that two nucleic acid sequences or polypeptides are identical is that the polypeptide encoded by the first nucleic acid is immunologically cross reactive with the antibodies raised against the polypeptide encoded by the second nucleic acid, as described below. Thus, a polypeptide is typically identical to a second polypeptide, for example, where the two peptides differ only by conservative substitutions. Another indication that two nucleic acid sequences are substantially identical is that the two molecules or their complements hybridize to each other under stringent conditions, as described herein.

In some cases, each antigen in a set can share at least 90%, at least 95%, or at least 99% sequence identity to at least one antigen in the set. In some cases, sequence identity can be a measure of how similar or different the sequences of the antigens within the vaccine are.

[0161] The terms “polypeptide,” “oligopeptide,” “peptide,” and “protein” are used interchangeably herein and generally refer to polymers of amino acids of any length. The polymer may be linear or branched, it may comprise modified amino acids, and it may be interrupted by non-amino acids. The terms also encompass an amino acid polymer that has been modified naturally or by intervention; for example, disulfide bond formation, glycosylation, lipidation, acetylation, phosphorylation, or any other manipulation or modification, such as conjugation with a labeling component. Also included within the definition are, for example, polypeptides containing one or more analogs of an amino acid (including, for example, unnatural amino acids, etc.), as well as other suitable modifications. It is understood that, because the polypeptides of this disclosure are based upon an antibody, the polypeptides can occur as single chains or associated chains.

[0162] “Polynucleotide” or “nucleic acid,” as used interchangeably herein, generally refer to polymers of nucleotides of any length, and include DNA and RNA. The nucleotides can be deoxyribonucleotides, ribonucleotides, modified nucleotides or bases, and/or their analogs, or any substrate that can be incorporated into a polymer by DNA or RNA polymerase. A polynucleotide may comprise modified nucleotides, such as methylated nucleotides and their analogs. If present, modification to the nucleotide structure may be imparted before or after assembly of the polymer. The sequence of nucleotides may be interrupted by non-nucleotide components. A polynucleotide may be further modified after polymerization, such as by conjugation with a labeling component. Other types of modifications include, for example, “caps,” substitution of one or more of the naturally-occurring nucleotides with an analog, internucleotide modifications such as, for example, those with uncharged linkages (e.g., methyl phosphonates, phosphotriesters, phosphoamidates, carbamates, etc.) and with charged linkages (e.g., phosphorothioates, phosphorodithioates, etc.), those containing pendant moieties, such as, for example, proteins (e.g., nucleases, toxins, antibodies, signal peptides, ply-L-lysine, etc.), those with intercalators (e.g., acridine, psoralen, etc.), those containing chelators (e.g., metals, radioactive metals, boron, oxidative metals, etc.), those containing alkylators, those with modified linkages (e.g., alpha anomeric nucleic acids, etc.), as well as unmodified forms of the polynucleotide(s).

[0163] Further, any of the hydroxyl groups ordinarily present in the sugars may be replaced, for example, by phosphonate groups, phosphate groups, protected by standard protecting groups, or activated to prepare additional linkages to additional nucleotides, or may be conjugated to solid supports. The 5′ and 3′ terminal OH can be phosphorylated or substituted with amines or organic capping group moieties of from 1 to 20 carbon atoms. Other hydroxyls may also be derivatized to standard protecting groups. Polynucleotides can also contain analogous forms of ribose or deoxyribose sugars including, for example, 2′-O-methyl-, 2′-O-allyl, 2′-fluoro- or 2′-azido-ribose, carbocyclic sugar analogs, alpha-anomeric sugars, epimeric sugars such as arabinose, xyloses, or lyxoses, pyranose sugars, furanose sugars, sedoheptuloses, acyclic analogs, and abasic nucleoside analogs such as methyl riboside. One or more phosphodiester linkages may be replaced by alternative linking groups. These alternative linking groups include, but are not limited to, embodiments wherein phosphate is replaced by P(O)S (“thioate”), P(S)S (“dithioate”), (O)NR₂ (“amidate”), P(O)R, P(O)OR′, CO, or CH₂ (“formacetal”), in which each R or R′ is independently H or substituted or unsubstituted alkyl (1-20 C) optionally containing an ether (—O—) linkage, aryl, alkenyl, cycloalkyl, cycloalkenyl, or araldyl. Not all linkages in a polynucleotide need be identical. The preceding description applies to all polynucleotides referred to herein, including RNA and DNA.

[0164] “Homology,” “identity,” or “similarity” can refer to sequence similarity between two peptides or between two nucleic acid molecules. Homology, similarity, and identity can each be determined by comparing a position in each sequence which may be aligned for purposes of comparison. When an equivalent position in the compared sequences is occupied by the same base or amino acid, then the molecules are identical at that position; when the equivalent site occupied by the same or a similar amino acid residue (e.g., similar in steric and/or electronic nature), then the molecules can be referred to as homologous (similar) at that position. Expression as a percentage of homology/similarity or identity refers to a function of the number of identical or similar amino acids at positions shared by the compared sequences. A sequence which is “unrelated” or “non-homologous” may share less than 40% identity or less than 25% identity with a sequence of the present disclosure. In comparing two sequences, the absence of residues (amino acids or nucleic acids) or presence of extra residues also decreases the identity and homology/similarity.

[0165] The term “homology” describes a mathematically based comparison of sequence similarities which is used to identify genes or proteins with similar functions or motifs. The nucleic acid (nucleotide or oligonucleotide) and amino acid (protein) sequences of the present disclosure may be used as a “query sequence” to perform a search against public databases to, for example, identify other family members, related sequences or homologs. Such searches can be performed using the NBLAST and XBLAST programs (version 2.0) of Altschul, et al. (1990) J. Mol. Biol. 215:403-10. BLAST nucleotide searches can be performed with the NBLAST program, score=100, wordlength=12 to obtain nucleotide sequences homologous to nucleic acid molecules of the disclosure. BLAST amino acid searches can be performed with the XBLAST program, score=50, wordlength=3 to obtain amino acid sequences homologous to protein molecules of the disclosure. To obtain gapped alignments for comparison purposes, Gapped BLAST can be utilized as described in Altschul et al., (1997) Nucleic Acids Res. 25(17):3389-3402. When utilizing BLAST and Gapped BLAST programs, the default parameters of the respective programs (e.g., XBLAST and BLAST) can be used (see, www.ncbi.nlm.nih.gov).

[0166] As used herein, “identity” can mean the percentage of identical nucleotide or amino acid residues at corresponding positions in two or more sequences when the sequences are aligned to maximize sequence matching, i.e., taking into account gaps and insertions. Identity can be readily calculated by known methods including, but not limited to, those described in Computational Molecular Biology, Lesk, A. M., ed., Oxford University Press, New York, 1988; Biocomputing: Informatics and Genome Projects, Smith, D. W., ed., Academic Press, New York, 1993; Computer Analysis of Sequence Data, Part I, Griffin, A. M., and Griffin, H. G., eds., Humana Press, New Jersey, 1994; Sequence Analysis in Molecular Biology, von Heinje, G., Academic Press, 1987; and Sequence Analysis Primer, Gribskov, M. and Devereux, J., eds., M Stockton Press, New York, 1991; and Carillo, H., and Lipman, D., SIAM J. Applied Math., 48: 1073 (1988). Methods to determine identity are designed to give the largest match between the sequences tested. Moreover, methods to determine identity are codified in publicly available computer programs. Computer program methods to determine identity between two sequences include, but are not limited to, the GCG program package (Devereux, J., et al., Nucleic Acids Research 12(1): 387 (1984)), BLASTP, BLASTN, and FASTA (Altschul, S. F. et al., J. Molec. Biol. 215: 403-410 (1990) and Altschul et al. Nuc. Acids Res. 25: 3389-3402 (1997)). The BLAST X program is publicly available from NCBI and other sources (BLAST Manual, Altschul, S., et al., NCBI NLM NIH Bethesda, Md. 20894; Altschul, S., et al., J. Mol. Biol. 215: 403-410 (1990). The well-known Smith Waterman algorithm may also be used to determine identity.

[0167] Ranges of desired degrees of sequence identity are from about 80% to about 100% and integer values therebetween. In general, this disclosure encompasses sequences with about 80%, about 81%, about 82%, about 83%, about 84%, about 85%, about 86%, about 87%, about 88%, about 89%, about 90%, about 91%, about 92%, about 93%, about 94%, about 95%, about 96%, about 97%, about 98%, or about 99% sequence identity with any sequence provided herein.

[0168] The letter “X” as used in amino acid sequences herein is intended to indicate that any of the twenty standard amino acids may be placed at this position unless specifically noted otherwise.

### III. Vaccines

[0169] A vaccine can be a composition that can stimulate the immune system. This can involve stimulation of the production of antibodies and can provide immunity against one or more microbes. A vaccine can be prepared from a microbe, which can be a causative agent of a disease, its products, or a synthetic substitute thereof. Examples of microbes are provided above.

[0170] A vaccine can be prepared as a pharmaceutical composition. A pharmaceutical composition can be a formulation of a vaccine, including antigens, in a form that can be administered to a subject. In some cases, a pharmaceutical composition can be ready to use. A pharmaceutical composition can be optimized for ease of use, minimization of adverse reactions, ease of storage, a range of storage temperatures, ease of dosing, ease of manufacturing, or any other suitable factor.

[0171] A pharmaceutical composition can comprise a vaccine composition as described herein and a pharmaceutically acceptable diluent, adjuvant, excipient, or any combination thereof. In some cases, the pharmaceutical composition can comprise a diluent. A diluent can be a diluting agent. A diluent can serve to make a vaccine less viscous or less dense, to improve its ability to flow, for example, through a needle. In some cases, a diluent can be pre-mixed with the vaccine. In some cases, a diluent can be provided separately from the vaccine and mixed prior to administration.

[0172] In some cases, the pharmaceutical composition can comprise an adjuvant. An adjuvant can provide for increased immunogenicity. An adjuvant can provide for slow release of antigen (e.g., the adjuvant can be a liposome) or it can be an adjuvant that is immunogenic in its own right, thereby functioning synergistically with antigens. For example, the adjuvant can be a known adjuvant or other substance that promotes nucleic acid uptake, recruits immune system cells to the site of administration, or facilitates the immune activation of responding lymphoid cells. Adjuvants include, but are not limited to, immunomodulatory molecules (e.g., cytokines), oil and water emulsions, aluminum hydroxide, glucan, dextran sulfate, iron oxide, sodium alginate, Bacto-Adjuvant, synthetic polymers such as poly amino acids and co-polymers of amino acids, saponin, paraffin oil, PS-GAMP and muramyl dipeptide.

[0173] In some cases, the adjuvant can be an immunomodulatory molecule. For example, the immunomodulatory molecule can be a recombinant protein cytokine, chemokine, or immunostimulatory agent or nucleic acids encoding cytokines, chemokines, or immunostimulatory agents designed to enhance the immunologic response.

[0174] A pharmaceutical composition as provided herein can be packaged in a virus-like particle (VLP). In some cases, a virus-like particle can comprise a vaccine.

[0175] In certain cases, the pharmaceutical composition can comprise an excipient. In various cases, an excipient can be an inactive substance that can serve as a vehicle or medium for the vaccine. An excipient can comprise a binder, a coating, a color, a disintegrant, a flavor, a glidant, a lubricant, a preservative, a sorbent, a sweetener, a vehicle, or any combination thereof.

[0176] A vaccine composition or pharmaceutical composition herein can be formulated in one of a number of formulations. In some cases, a vaccine can be in the form of an aerosol formulation, an injectable formulation, an oral formulation, or any other suitable formulation.

[0177] A vaccine composition as provided herein can be formulated as a unit dose. A unit dose can be the dose of a vaccine which is appropriate for one subject. In some examples, a vaccine can be packaged as a single unit dose. In some other examples, a vaccine can be packaged as multiple unit doses.

[0178] An immune response generated in response to a vaccine can depend on the total amount of antigen, rather than the amount of each antigen present. In some cases, each of the antigens can be at a concentration that alone would not provide a significant immune response to the broadly neutralizing antigen in a subject. Such an immune response can comprise recruiting and/or activation if immune cells such as B cells or T cells. In some cases, such an immune response can be a prophylactic immune response. In some cases, the antigens can have a combined concentration that provides an immune response to a broadly neutralizing antigen in the subject.

### IV. Methods of Use

[0179] Provided herein are methods for treating or reducing adverse events due to infection and/or exposure to a microbe or toxin. Also provided herein are methods for inhibiting or reducing the likelihood of a disease or condition caused by a microbe or toxin in a subject. The methods can comprise administering to the subject a vaccine composition as described herein. In some cases, methods provided herein can confer immunity to a disease or condition caused by a microbe in a subject.

[0180] The terms “treatment” or “treating” are used interchangeably herein. These terms, as used herein, generally refer to an approach for obtaining beneficial or desired results including, but not limited to, a therapeutic benefit and/or a prophylactic benefit. A therapeutic benefit can mean eradication or amelioration of the underlying disorder being treated. Also, a therapeutic benefit can be achieved with the eradication or amelioration of one or more of the physiological symptoms associated with the underlying disorder such that an improvement is observed in the subject, notwithstanding that the subject may still be afflicted with the underlying disorder. A prophylactic effect includes delaying, preventing, or eliminating the appearance of a disease or condition, delaying or eliminating the onset of symptoms of a disease or condition, slowing, halting, or reversing the progression of a disease or condition, or any combination thereof. For prophylactic benefit, a subject at risk of developing a particular disease, or to a subject reporting one or more of the physiological symptoms of a disease may undergo treatment, even though a diagnosis of this disease may not have been made.

[0181] A subject administered a vaccine herein can be a mammal, a bird, or any other suitable subject. In some instances, the subject can be a human. In certain instances, the subject can be a pig, or another domesticated animal, for example, a cow, a goat, a sheep, a horse, a chicken, a rooster, a turkey, a parrot, a monkey, a hamster, a guinea pig, a rat, a mouse, a dog, or a cat.

[0182] Such a subject can receive the vaccine orally, as an aerosol, as an injection, or a combination thereof. In some cases, more than one dose of the vaccine may be given. In some cases, a subject can receive one, two, three, four, five, six, seven, eight, nine, ten or more doses of a vaccine. Repeated doses can be given on the same day, or they can be spaced by at least 1 day, at least 1 week, at least 1 month, at least 1 year, at least 2 years, at least 3 years, at least 4 years, at least 5 years, or at least 10 years. In some cases, repeated doses can be given as a booster dose, and can be the same dose, a greater dose, or a lesser dose than previous doses. A booster dose can be a primed boost.

[0183] Individual doses of a vaccine having repeated doses can comprise the same antigens or different antigens. If individual doses comprise different antigens, they can be different by at least one, two, three, four, five, six, seven, eight, nine, ten or more antigens. In some cases, if individual doses comprise different antigens, the difference can be to maximize exposure to as many different antigens as possible. In some cases, if individual doses comprise different antigens, the additional doses can be “update” doses, which can confer immunity to newly evolved, adapted, or resistant strains.

[0184] In certain embodiments, a vaccine which is to be injected can be formulated as a subcutaneous injection. In some cases, a vaccine to be injected can be formulated for intramuscular, intraperitoneal, intravenous, intradermal, or any other suitable type of injection. A vaccine can be administered to a subject who is healthy, a subject who is not healthy, or a subject of unknown health. In some cases, a vaccine can be more effective if the subject is healthy. A vaccine can comprise a recombinant expression vector. In some cases, a vaccine can be made by a recombinant expression vector. In various cases, a vaccine can be stored as a recombinant expression vector.

[0185] In some instances, a recombinant expression vector can comprise a nucleic acid molecule encoding a set of antigens that are representative of at least 60% of each of first order clade and second order clades of a microbe; a set of antigens wherein the smallest pairwise edit distance between two of the antigens is no more than 25 and the largest pairwise edit distance between two of the antigens is at least 300; a set of antigens that are representative of at least 60% of all OTUs of the microbe; or a set of antigens that are representative of at least 60% of all OTUs of the microbe.

[0186] In certain instances, a recombinant expression vector can comprise a nucleic acid molecule encoding a recombinant expression vector comprising a nucleic acid molecule encoding: a set of antigens that are representative of at least 60% of each of first order clade and second order clades of a microbe; a set of antigens wherein the smallest pairwise edit distance between two of the antigens is no more than 5% of the size of the antigens, and the largest pairwise edit distance is at least 75% of the size of the antigens, a set of antigens that are representative of at least 60% of all OTUs of the microbe; or a set of antigens that are representative of at least 60% of all OTUs of the microbe.

[0187] In various instances, a recombinant expression vector can comprise a nucleic acid molecule encoding a set of antigens that are representative of at least 50%, at least 60%, at least 70%, at least 80%, at least 90%, or 100% of each of the first order clades of a microbe. In some cases, a recombinant expression vector can comprise a nucleic acid molecule encoding a set of antigens that are representative of at least 50%, at least 60%, at least 70%, at least 80%, at least 90%, or 100% of each of the second order clades of a microbe. In certain cases, a recombinant expression vector can comprise a nucleic acid molecule encoding a set of antigens that are representative of at least 50%, at least 60%, at least 70%, at least 80%, at least 90%, or 100% of each of the third order clades of a microbe.

[0188] In some cases, a recombinant expression vector can comprise a nucleic acid molecule encoding a set of antigens wherein the smallest pairwise edit distance between two of the antigens is no more than 1%, no more than 5%, no more than 10%, no more than 15%, or no more than 20% of the size of the antigens. In some cases, a recombinant expression vector can comprise a nucleic acid molecule encoding a set of antigens wherein the largest pairwise edit distance is at least 60%, at least 70%, at least 80%, at least 90%, at least 95%, or at least 98% of the size of the antigens. In some cases, a recombinant expression vector can comprise a nucleic acid molecule encoding a set of antigens wherein the smallest pairwise edit distance between two of the antigens is no more than 1%, and the largest pairwise edit distance is at least 60%, at least 70%, at least 80%, at least 90%, at least 95%, or at least 98% of the size of the antigens. In certain cases, a recombinant expression vector can comprise a nucleic acid molecule encoding a set of antigens wherein the smallest pairwise edit distance between two of the antigens is no more than 5%, and the largest pairwise edit distance is at least 60%, at least 70%, at least 80%, at least 90%, at least 95%, or at least 98% of the size of the antigens. In various cases, a recombinant expression vector can comprise a nucleic acid molecule encoding a set of antigens wherein the smallest pairwise edit distance between two of the antigens is no more than 10%, and the largest pairwise edit distance is at least 60%, at least 70%, at least 80%, at least 90%, at least 95%, or at least 98% of the size of the antigens. In some cases, a recombinant expression vector can comprise a nucleic acid molecule encoding a set of antigens wherein the smallest pairwise edit distance between two of the antigens is no more than 15%, and the largest pairwise edit distance is at least 60%, at least 70%, at least 80%, at least 90%, at least 95%, or at least 98% of the size of the antigens. In certain cases, a recombinant expression vector can comprise a nucleic acid molecule encoding a set of antigens wherein the smallest pairwise edit distance between two of the antigens is no more than 20%, and the largest pairwise edit distance is at least 60%, at least 70%, at least 80%, at least 90%, at least 95%, or at least 98% of the size of the antigens.

[0189] In some cases, a recombinant expression vector can comprise a nucleic acid molecule encoding a set of antigens wherein the smallest pairwise edit distance between two of the antigens is at least 1%, at least 5%, at least 10%, at least 15%, or at least 20% of the size of the antigens. In certain cases, a recombinant expression vector can comprise a nucleic acid molecule encoding a set of antigens wherein the largest pairwise edit distance is no more than 60%, no more than 70%, no more than 80%, no more than 90%, no more than 95%, or no more than 98% of the size of the antigens. In various cases, a recombinant expression vector can comprise a nucleic acid molecule encoding a set of antigens wherein the smallest pairwise edit distance between two of the antigens is at least 1%, and the largest pairwise edit distance is no more than 60%, no more than 70%, no more than 80%, no more than 90%, no more than 95%, or no more than 98% of the size of the antigens. In certain cases, a recombinant expression vector can comprise a nucleic acid molecule encoding a set of antigens wherein the smallest pairwise edit distance between two of the antigens is at least 5%, and the largest pairwise edit distance is no more than 60%, no more than 70%, no more than 80%, no more than 90%, no more than 95%, or no more than 98% of the size of the antigens. In various cases, a recombinant expression vector can comprise a nucleic acid molecule encoding a set of antigens wherein the smallest pairwise edit distance between two of the antigens is at least 10%, and the largest pairwise edit distance is no more than 60%, no more than 70%, no more than 80%, no more than 90%, no more than 95%, or no more than 98% of the size of the antigens. In some cases, a recombinant expression vector can comprise a nucleic acid molecule encoding a set of antigens wherein the smallest pairwise edit distance between two of the antigens is at least 15%, and the largest pairwise edit distance is no more than 60%, no more than 70%, no more than 80%, no more than 90%, no more than 95%, or no more than 98% of the size of the antigens. In certain cases, a recombinant expression vector can comprise a nucleic acid molecule encoding a set of antigens wherein the smallest pairwise edit distance between two of the antigens is at least 20%, and the largest pairwise edit distance is no more than 60%, no more than 70%, no more than 80%, no more than 90%, no more than 95%, or no more than 98% of the size of the antigens.

[0190] A method for making a vaccine composition can comprise selecting a set of antigens that are representative of at least 60% of each of the first order clade and second order clades of a microbe, wherein the smallest pairwise edit distance between two of the antigens is no more than 5% of the size of the antigens, and the largest pairwise edit distance is at least 75% of the size of the antigens, representative of at least 60% of all OTUs of the microbe, or representative of at least 90% of all OTUs of the microbe.

[0191] In some cases, a method for making a vaccine composition can comprise selecting a set of antigens that are representative of at least 50%, at least 60%, at least 70%, at least 80%, at least 90%, or 100% of each of the first order clades of a microbe. In certain cases, a method for making a vaccine composition can comprise selecting a set of antigens that are representative of at least 50%, at least 60%, at least 70%, at least 80%, at least 90%, or 100% of each of the second order clades of a microbe. In various cases, a method for making a vaccine composition can comprise selecting a set of antigens that are representative of at least 50%, at least 60%, at least 70%, at least 80%, at least 90%, or 100% of each of the third order clades of a microbe.

[0192] In some cases, a method for making a vaccine composition can comprise selecting a set of antigens wherein the smallest pairwise edit distance between two of the antigens is no more than 1%, no more than 5%, no more than 10%, no more than 15%, or no more than 20% of the size of the antigens. In certain cases, a method for making a vaccine composition can comprise selecting a set of antigens wherein the largest pairwise edit distance is at least 60%, at least 70%, at least 80%, or at least 90% of the size of the antigens. In various cases, a method for making a vaccine composition can comprise selecting a set of antigens wherein the smallest pairwise edit distance between two of the antigens is no more than 1%, and the largest pairwise edit distance is at least 60%, at least 70%, at least 80%, or at least 90% of the size of the antigens. In some cases, a method for making a vaccine composition can comprise selecting a set of antigens wherein the smallest pairwise edit distance between two of the antigens is no more than 5%, and the largest pairwise edit distance is at least 60%, at least 70%, at least 80%, or at least 90% of the size of the antigens. In certain cases, a method for making a vaccine composition can comprise selecting a set of antigens wherein the smallest pairwise edit distance between two of the antigens is no more than 10%, and the largest pairwise edit distance is at least 60%, at least 70%, at least 80%, or at least 90% of the size of the antigens. In various cases, a method for making a vaccine composition can comprise selecting a set of antigens wherein the smallest pairwise edit distance between two of the antigens is no more than 15%, and the largest pairwise edit distance is at least 60%, at least 70%, at least 80%, or at least 90% of the size of the antigens. In some cases, a method for making a vaccine composition can comprise selecting a set of antigens wherein the smallest pairwise edit distance between two of the antigens is no more than 20%, and the largest pairwise edit distance is at least 60%, at least 70%, at least 80%, or at least 90% of the size of the antigens.

### V. Examples

[0193] Vaccines were developed that can, for example, differ from (and/or provide advantages relative to) typical commercial vaccines in at least one of several ways: (1) the inclusion of numerous (e.g., six or more) antigens, for example, 30 antigens, (2) a relatively low amount of each individual antigen, for example, 0.05 μg of each antigen, which can allow for a relatively low amount of total antigen content, and (3) the breadth of immunogenic response elicited by the vaccine against shared sites on the antigens, for example, each of 30 antigens is at 0.05 μg, but shared sites are effectively at a 30× higher dose of 1.5 μg.

[0194] For the following examples, flu vaccine compositions were administered to pigs. Several flu vaccine compositions were used. The vehicle comprised squalene and phosphate buffered saline for all compositions. A vehicle control composition comprised squalene and phosphate buffered saline. A bivalent control flu vaccine, designed to mimic commercially available flu vaccines, comprised two flu antigen variants: H1N1_2007 (A/Brisbane/2007) (5 μg) and either H3N2_1997 (A/Sydney/5/1997) or H3N2_2007 (A/Brisbane/2007) (5 μg). A first single antigen flu vaccine composition comprised 50 ng of a first hemagglutinin variant (H1N1_2007; A/Brisbane/2007). A second single antigen flu vaccine composition comprised 50 ng of a second hemagglutinin variant (H3N2_2007; A/Brisbane/2007). A 30-antigen flu vaccine composition comprised 30 flu antigens (30 hemagglutinin variants), representing flu antigens from between 1918 and 2015, selected as described in Example 4. A 27-antigen flu vaccine composition comprised 27 flu antigens (27 hemagglutinin variants), representing flu antigens from between 1918 and 2008. The 30-antigen flu vaccine composition was also employed for general vaccine composition testing. The 27-antigen flu vaccine was employed to test the ability of the vaccine to protect against “future” strains, which might be described as the ability of the vaccine to provide protection against antigen variants which do not exist yet, but may exist in the future.

[0195] The following illustrative examples are representative of embodiments of the compositions and methods described herein and are not meant to be limiting in any way.

### Example 1: Quantifying the Number of Unique Antibodies Elicited after Vaccination

[0196] Adult humans can comprise a B cell receptor (BCR) repertoire of about 100 million unique BCRs. After influenza vaccination, about 1,000 unique BCRs can be elicited to begin affinity maturation. Serological analysis indicates that about 10% of these can efficiently convert to productive plasma cells. This can result in a flu shot that can provide serological protection with about 100 unique antibodies. This concept is illustrated in FIG. 4.

### Example 2: Estimating the Number of Unique B Cell Epitopes on Hemagglutinin

[0197] Human antibodies can contact about 20 to 30 residues on the antigen surface they recognize. In some cases, about 12 to 16 such residues can form an epitope that can be referred to as a “potential critical epitope.” In some cases, such an epitope can be consequential for maintaining recognition of an antigen by an antibody.

[0198] Given roughly 100 unique antibodies from about 1000 B cell lineages elicited by vaccination it was asked: (1) how many unique epitopes existed on the surface of the influenza hemagglutinin protein (HA), (2) given the conservation of those epitopes, what was the probability of an individual antibody to be broadly cross-reactive, and (3) across the roughly 100 unique antibodies, the probability and percentage of a subject's vaccine response to be contain broadly protective antibodies.

[0199] In order to generate a database of unique potential critical epitopes on the surface of the influenza hemagglutinin protein (HA), deep computational protein-protein docking of 559 crystallized human antibody structures against a representative HA structure (PDB ID: 3FKU) using Zdock was performed. This resulted in 3,718,346 unique contact residue sets, each containing 25+/−12 HA contact residues. Repeat random subsampling of 14 contact residues from the unique contact residue sets on the HA that could form a potential critical epitope was then performed, resulting in a database of 263,022,674 unique 14-residue potential critical epitopes that could define the binding determinant of a single antibody. While not exhaustive, the database provides the basis for modeling epitope conservation probability of human antibodies binding HAs. This concept is illustrated in FIG. 4.

### Example 3: Quantifying Amino Acid Conservation of all Hemagglutinin Epitopes

[0200] The conservation of the 263 million potential critical epitopes across a panel of 82 HA protein sequences from strains spanning the years 1918-2018 was analyzed. The analysis identified less than one in one million potential critical epitopes that are universally conserved across all HAs. About one in 300,000 potential critical epitopes were observed to be 90% conserved across all strains, while 1% and 3% were observed to be universally conserved within a given HA antigen group, as shown in FIG. 5. Potential critical epitopes that were 90% conserved in H1 or H3 antigen groups were less common (6.9% and 5.8% for H1 and H3, respectively). This can suggest that in some cases, non-broadly conserved epitopes can be immunodominant by virtue of vastly outnumbering broadly conserved epitopes.

[0201] The model suggested that truly universally conserved epitope binding antibodies may be too rare to occur in most immune systems, and that broad antibodies recognizing conserved epitopes within a strain can occur, but may represent a minority of responses, and can be unlikely to exist at a concentration sufficient to mediate sufficient protection in following years. For example, given 100 responding antibodies, most subjects are not predicted to elicit antibodies against broadly conserved epitopes. For subjects that can or might be able to elicit antibodies against broadly conserved epitopes given 100 responding antibodies, in most cases that antibody can make up about 1% of their serum response. In such cases, antigen drift between seasons can be enough to render the remaining 99% of the antibody titers of the subject obsolete or nearly obsolete. Combined with natural titer drops that occur over time, such subjects can be eventually left unprotected.

[0202] This model was consistent with observations that seasonal variation of about 10%-15% of amino acid positions can be sufficient to disrupt the majority of epitopes against the hemagglutinin, and can lead to the requirement of continual vaccination by current methods.

[0203] Further, immunizing with just hemagglutinin stems could provide some benefit, but seasonal variation within stems can continue to render the majority of epitopes obsolete. Variations of the immunogen, including consensus hemagglutinin variants, can provide benefit which can be limited. Enhanced adjuvants would likely not solve the breadth challenge, as they can increase the total number of responding antibodies, and may be able to alter the fundamental critical epitope conservation probability distribution.

[0204] While conserved epitopes exist within the stem and head of hemagglutinin, their proportions can be too low to elicit a dominant proportion of an immune response by most subjects, including most humans or most pigs, and there can be a low probability that this can be solved through optimization of the sequence of the immunogen or enhancements of an adjuvant.

### Example 4: Generation of Flu Vaccine Compositions

[0205] At present, commercial vaccines generally deliver between about 10-50 μg of total antigen. Such commercial vaccines often include only two antigens (a bivalent vaccine), three antigens (a trivalent vaccine), or four antigens (a quadrivalent vaccine).

[0206] To identify an optimally dispersed population of hemagglutinin variants, a method was developed to take as input a large database of homologous variants of a target antigen, and output a stochastically generated subset of optimally dispersed representatives based on amino acid percent identity. Herein, the input was a large database of homologous variants of a hemagglutinin antigen for influenza, and the output was a subset of the antigens which were representative of the input group of antigens as described herein. In this example, two distinct vaccine compositions were designed for administration to subjects.

[0207] This method was repeatedly applied for 1000 stochastic iterations to 8600 hemagglutinin variants spanning the time period from 1918 to 2015 to output a set of 30 representative flu antigen variants. These variants comprise the 30-antigen vaccine composition, and are detailed in Table 2. Antigens were purchased from Sino Biological, Inc. (Beijing, China).

TABLE 2
30-antigen vaccine composition

| Strain | Year | Strain Info |
|---|---|---|
| H1N1 | 1998 | A/swine/Belgium/1998 |
| H1N1 | 1934 | A/Puerto Rico/1934 |
| H1N1 | 2006 | A/Solomon Islands/2006 |
| H1N1 | 1995 | A/Beijing/1995 |
| H1N1 | 1977 | A/USSR/1977 |
| H1N1 | 1976 | A/New Jersey/1976 |
| H1N1 | 2007 | A/Brisbane/2007 |
| H1N1 | 1933 | A/WSN/1933 |
| H1N1 | 2009 | A/California/2009 |
| H2N2 | 1957 | A/Guiyang/1957 |
| H2N2 | 2005 | A/Canada/2005 |
| H3N2 | 2002 | A/Fujian/2002 |
| H3N2 | 1997 | A/Sydney/1997 |
| H3N2 | 2007 | A/Brisbane/2007 |
| H3N2 | 2004 | A/California/2004 |
| H3N2 | 2014 | A/Missouri/2014 |
| H3N2 | 1995 | A/Nanchang/1995 |
| H5N1 | 1997 | A/Hong Kong/1997 |
| H5N1 | 2008 | A/chicken/VietNam/2008 |
| H5N1 | 2010 | A/barnswallow/Hong Kong/2010 |
| H5N1 | 2004 | A/Vietnam/2004 |
| H7N7 | 1975 | A/equine/Kentucky/1975 |
| H7N7 | 2003 | A/Netherlands/2003 |
| H7N9 | 2013 | A/Zhejiang/2013 |
| B | 1988 | B/Yamagata/1988 |
| B | 2012 | B/Utah/2012 |
| B | 2008 | B/Brisbane/2008 |
| H1N1 | 1918 | A/New York/1918 |
| H3N2 | 1968 | A/Hong Kong/1968 |
| H5N1 | 2009 | A/Egypt/2009 |

[0208] In some examples, a 27-antigen vaccine composition, designed to be representative of antigen variants spanning the time period from 1918 to 2008, was used. Most of the antigens of this 27-antigen vaccine composition are also included in the 30-antigen vaccine composition. This vaccine composition can be used to determine efficacy of such a composition having antigens representative of an epitope of a microbe against “future antigens,” and includes the antigens in Table 3. Antigens were purchased from Sino Biological, Inc. (Beijing, China).

TABLE 3
27-antigen vaccine composition

| Strain | Year | Strain Info |
|---|---|---|
| H1N1 | 1998 | A/swine/Belgium/1998 |
| H1N1 | 1934 | A/Puerto Rico/1934 |
| H1N1 | 2006 | A/Solomon Islands/2006 |
| H1N1 | 1995 | A/Beijing/1995 |
| H1N1 | 1977 | A/USSR/1977 |
| H1N1 | 1976 | A/New Jersey/1976 |
| H1N1 | 2007 | A/Brisbane/2007 |
| H1N1 | 1933 | A/WSN/1933 |
| H2N2 | 1957 | A/Guiyang/1957 |
| H2N2 | 2005 | A/Canada/2005 |
| H3N2 | 2002 | A/Fujian/2002 |
| H3N2 | 1997 | A/Sydney/1997 |
| H3N2 | 2007 | A/Brisbane/2007 |
| H3N2 | 2004 | A/California/2004 |
| H3N2 | 1995 | A/Nanchang/1995 |
| H5N1 | 1997 | A/Hong Kong/1997 |
| H5N1 | 2008 | A/chicken/VietNam/2008 |
| H5N1 | 2004 | A/Vietnam/2004 |
| H7N7 | 1975 | A/equine/Kentucky/1975 |
| H7N7 | 2003 | A/Netherlands/2003 |
| H1N1 | 1918 | A/New York/1918 |
| H3N2 | 1968 | A/Hong Kong/1968 |
| H1N1 | 1991 | A/Texas/36/1991 |
| H1N1 | 1986 | A/Tawain/01/1986 |
| H1N3 | 1976 | A/duck/NZL/1976 |
| H3N2 | 2003 | A/Wyoming/03/2003 |
| H6N2 | 2000 | A/duck/Shantou/2000 |

[0209] In some examples, a vaccine composition comprising 73 flu hemagglutinin antigens from human, swine, and unknown hosts from 1918 through 2018 was used. Antigens in this composition are provided in Table 4. Antigens were purchased from Sino Biological, Inc. (Beijing, China). The amino acid sequences for these antigens are SEQ ID NOs:1-87, as listed in Table 6.

TABLE 4
Flu hemagglutinin antigen vaccine composition

| Subtype | Host | Year | Strain Info |
|---|---|---|---|
| H1N1 | human | 1918 | A/New.York/1/1918 |
| H1N1 | human | 1933 | A/WSN/1933 |
| H1N1 | human | 1934 | A/Puerto.Rico/8/1934 |
| H1N1 | swine | 1935 | A/swine/Ohio/23/1935 |
| H1N1 | swine | 1939 | A/swine/Cambridge/1939.1939 |
| H1N1 | human | 1945 | A/Huston/1945 |
| H1N1 | swine | 1946 | A/H1N1-1946-ACV49556-/Melbourne/1/ |
| | | | 1946 |
| H1N1 | human | 1957 | A/Denver/1957 |
| H1N1 | human | 1976 | A/New.Jersey/8/1976 |
| H1N1 | human | 1977 | A/USSR/90/1977 |
| H1N1 | human | 1986 | A/Tawain/01/1986 |
| H1N1 | human | 1991 | A/Texas/36/1991 |
| H1N1 | swine | 1995 | A/swine/OMS/2112/1995.1995 |
| H1N1 | human | 1995 | A/Beijing/262/1995 |
| H1N1 | swine | 1996 | A/swine/Eire/89/1996.1996 |
| H1N1 | human | 1999 | A/Taiwan/4845/1999.1999 |
| H1N1 | swine | 2000 | H1N1-2000-swine-AAL87868-/ |
| | | | Swine/Minnesota/55551/2000 |
| H1N1 | swine | 2004 | A/swine/Saitama/21/2004.2004 |
| H1N1 | swine | 2004 | A/swine/Kansas/00246/2004 |
| H1N1 | swine | 2004 | A/swine/Denmark/12813-1/2004 |
| H1N1 | swine | 2014 | A/swine/Saskatchewan/SD0056/2014 |
| H1N1 | human | 2005 | A/Iowa/CEID23/2005.2005 |
| H1N1 | human | 2005 | A/Thailand/271/2005.2005/07 |
| H1N1 | swine | 2005 | A/swine/Tainan/46-4/2005 |
| H1N1 | swine | 2005 | A/swine/England/383/2005 |
| H1N1 | swine | 2006 | A/swine/Canada/01093/2006.2006 |
| H1N1 | human | 2006 | A/Solomon.Islands/3/2006 |
| H1N1 | swine | 2006 | A/swine/North Carolina/01169/2006 |
| H1N1 | swine | 2006 | A/swine/Miyazaki/1/2006 |
| H1N1 | human | 2007 | A/Brisbane/59/2007 |
| H1N1 | swine | 2007 | A/swine/England/267/2007 |
| H1N1 | swine | 2009 | A/swine/Korea/VDS3/2009.2009/09 |
| H1N1 | human | 2009 | A/California/07/2009 |
| H1N1 | swine | 2010 | A01049060/2010.2010/11 |
| H1N1 | human | 2011 | A/Wisconsin/28/2011.2011/12 |
| H1N1 | swine | 2011 | A/swine/Hong.Kong/4083/2011.2011/10 |
| H1N1 | human | 2012 | A/Minnesota/14/2012.2012/12 |
| H1N1 | swine | 2012 | A/swine/Belgium/Oostkamp-26/2012.2012/ |
| | | | 01 |
| H1N1 | swine | 2012 | A/swine/England/7856/2012.2012/02 |
| H1N1 | swine | 2012 | A/swine/England/038712/2012.2012/12 |
| H1N1 | swine | 2013 | AVX47/2013.2013/01 |
| H1N1 | human | 2016 | A/Pavia/65/2016.2016/10 |
| H1N1 | human | 2017 | A/Florida/04/2017 |
| H3N2 | human | 1968 | A/Hong.Kong/1/1968 |
| H3N2 | human | 1985 | A/Guildford/V728/1985 |
| H3N2 | swine | 1995 | A/swine/England/704563/1995.1995/08 |
| H3N2 | human | 1995 | A/Nanchang/933/1995 |
| H3N2 | human | 1997 | A/Sydney/5/1997 |
| H3N2 | swine | 1997 | A/swine/England/90591/1997 |
| H3N2 | swine | 2001 | A/swine/Spain/33601/2001 |
| H3N2 | human | 2002 | A/Fujian/411/2002 |
| H3N2 | human | 2003 | A/Wyoming/03/2003 |
| H3N2 | human | 2004 | A/California/7/2004 |
| H3N2 | swine | 2004 | A/swine/Taiwan/0408/2004 |
| H3N2 | human | 2005 | A/Mexico/InDRE2250/2005 |
| H3N2 | human | 2007 | A/Brisbane/10/2007 |
| H3N2 | human | 2008 | A/Ohio/14/2008 |
| H3N2 | swine | 2010 | A/swine/Denmark/101501-1/2010.2010/08 |
| H3N2 | human | 2011 | A/Delaware/05/2011 |
| H3N2 | swine | 2012 | A01203748/2012.2012/08 |
| H3N2 | swine | 2012 | A/swine/Thailand/CU-P53/2012.2012/01 |
| H3N2 | swine | 2012 | AVX13/2012.2012/01 |
| H3N2 | swine | 2013 | A/swine/Miyazaki/2/2013.2013 |
| H3N2 | swine | 2017 | A01812268/2017.2017/08 |
| H3N2 | human | 2018 | A/Indiana/11/2018 |
| H5N1 | unknown | 1997 | A/Hong.Kong/483/1997 |
| H5N1 | unknown | 2001 | A/Hong.Kong/378.1/2001 |
| H5N1 | unknown | 2003 | A/Beijing/01/2003 |
| H5N1 | unknown | 2004 | A/Vietnam/1194/2004 |
| H5N1 | unknown | 2006 | A/China/2006 |
| H5N1 | unknown | 2007 | A/Egypt/1394-NAMRU3/2007 |
| H5N1 | unknown | 2008 | A/chicken/VietNam/NCVD-016/2008 |
| H5N1 | unknown | 2008 | A/Bangladesh/207095/2008 |
| H5N1 | unknown | 2013 | A/Cambodia/X0123311/2013 |
| H5N1 | unknown | 2015 | A/Egypt/N0001/2015 |
| HAB | human | 1940 | B/Lee/40 |
| HAB | human | 1959 | B/Maryland/1959 |
| HAB | human | 1973 | B/Hong Kong/8/1973 |
| HAB | human | 1986 | B/Ann Arbor/1/1986 |
| HAB | human | 1992 | B/Oita/15/1992 |
| HAB | human | 2001 | B/Hong Kong/22/2001 |
| HAB | human | 2002 | B/Sydney/3/2002 |
| HAB | human | 2004 | B/Hong Kong/CUHK50947/2004 |
| HAB | human | 2006 | B/Kol/583/2006 |
| HAB | human | 2007 | B/Kol/1234/2007 |
| HAB | human | 2007 | B/Kol/1013/2007 |
| HAB | human | 2008 | B/Kol/1373/2008 |

[0210] In some examples, a vaccine composition comprising 28 flu neuraminidase antigens from human, swine, and unknown hosts from 1930 through 2019 was used. Antigens in this composition are provided in Table 5. Antigens were purchased from Sino Biological, Inc. (Beijing, China). The amino acid sequences for these antigens are SEQ ID NOs:88-127, as listed in Table 7.

TABLE 5
Flu neuraminidase antigen vaccine composition

| Strain | Host | Year | Strain Info |
|---|---|---|---|
| H1N1 | swine | 1930 | A/swine/Iowa/15/1930(H1N1) |
| H1N1 | human | 1936 | A/Henry/1936(H1N1) |
| H1N1 | human | 1943 | A/Iowa/1943(H1N1) |
| H1N1 | human | 1982 | A/Baylor/11515/1982(H1N1) |
| H1N1 | swine | 1993 | A/swine/Denmark/19216B/1993(H1N1) |
| H1N1 | human | 1995 | A/quail/Nanchang/12-340/2000(H1N1) |
| H1N1 | human | 1996 | A/Auckland/6/1996(H1N1) |
| H1N1 | human | 2001 | A/Auckland/606/2001(H1N1) |
| H1N1 | swine | 2006 | A/swine/Canada/01093/2006(H1N1) |
| H1N1 | human | 2008 | A/Arizona/13/2008(H1N1) |
| H1N1 | swine | 2012 | A/swine/Guangxi/NS2176/2012(H1N1) |
| H1N1 | swine | 2016 | A/swine/Alberta/SD0154/2016(H1N1) |
| H1N1 | human | 2017 | A/Idaho/01/2017(H1N1) |
| H1N1 | swine | 2018 | A/Sw/Bulnes/VN1401-P6SP/2018 |
| H3N2 | human | 1968 | A/Albany/18/1968(H3N2) |
| H3N2 | human | 1969 | A/Bilthoven/17938/1969(H3N2) |
| H3N2 | human | 1971 | A/Hong Kong/107/1971(H3N2) |
| H3N2 | swine | 1985 | A/swine/Italy/526/1985(H3N2) |
| H3N2 | human | 1992 | A/Amsterdam/4112/1992(H3N2) |
| H3N2 | human | 1998 | A/Hong Kong/CUHK19579/1998(H3N2) |
| H3N2 | swine | 2000 | A/Swine/Indiana/P12439/00 (H1N2) |
| H3N2 | human | 2005 | A/Australia/NHRC0005/2005(H3N2) |
| H3N2 | swine | 2007 | A/Swine/Spain/SF12091/2007(H1N2) |
| H3N2 | swine | 2009 | A/swine/Italy/191985/2009(H1N2) |
| H3N2 | swine | 2010 | A/swine/Papenburg/IDT12653/2010(H1N2) |
| H3N2 | swine | 2016 | A/swine/North Carolina/A01668056/ |
| | | | 2016(H1N2) |
| H3N2 | swine | 2017 | A/swine/Alberta/SD0217/2017 |
| H3N2 | human | 2019 | A/swine/China/JG20/2019 |
| HAB-NA | human | 1936 | HAB-NA-AHZ37009-/B/Nicaragua/AGB2- |
| | | | 36 |
| HAB-NA | human | 1940 | HAB-NA-AAA43749-/B/Lee/1940 |
| HAB-NA | human | 1959 | HAB-NA-AAA43735-/B/Maryland/59 |
| HAB-NA | human | 1973 | HAB-NA-BAA03412-/B/Kanagawa/73 |
| HAB-NA | human | 1994 | HAB-NA-AAU94767-/B/Nanchang/560/94 |
| HAB-NA | human | 1998 | HAB-NA-ABQ53764-/B/Siriraj/09/98 |
| HAB-NA | human | 2001 | HAB-NA-AAN39781-/B/Brazil/952/2001 |
| HAB-NA | human | 2005 | HAB-NA-AGZ60070-/B/Christchurch/38/ |
| | | | 2005 |
| HAB-NA | human | 2006 | HAB-NA-AEG20998-/B/Kol/515/2006 |
| HAB-NA | human | 2006 | HAB-NA-AEA51357-/B/Kol/583/2006 |
| HAB-NA | human | 2006 | HAB-NA-AEA51355-/B/Kol/542/2006 |
| HAB-NA | human | 2007 | HAB-NA-ABX71686-/B/Guangzhou/01/ |
| | | | 2007 |

[0211] Additional amino acid sequences for antigens that can be included in a vaccine are provided as SEQ ID NOs:128-171, as listed in Table 8.

### Example 5: Hemagglutinin Inhibition Assay

[0212] A hemagglutinin inhibition assay can be used to measure an immune response conferred by a vaccine. A sample protocol for a hemagglutinin inhibition assay can begin with the preparation of a serial dilution of a virus, and can include the preparation of at least one negative control or positive control sample, or both a negative control sample and a positive control sample. Antibodies which might be against a virus, for example, in a serum sample, can be incubated with the virus. Red blood cells can then be added to each sample and incubated, and hemagglutinin can be observed. In some cases, the absence of a button can be considered a positive response. In some cases, a titer can be calculated and reported.

### Example 6: Influenza Neutralization Assay

[0213] A sample protocol for an influenza neutralization assay can begin with the preparation of a serial dilution of an antibody or a solution comprising an antibody, for example, serum. Provided next is a sample method for producing such a serial dilution. The antibody dilutions can be prepared using a virus diluent. A virus diluent can be added to wells of a microtiter plate, such as a 96-well plate. In some cases, 50 μL of virus diluent can be added in each well. Then, 50 μL of the antibody or solution comprising an antibody can be added to the first well. In some cases, this can be a 1 mg/mL stock solution. In some cases, this can be serum. In some cases, this can be diluted serum. 2-fold serial dilutions can be accomplished by transferring 50 μL from the first well to each successive well to accomplish dilutions ranging from 1:1 to 1:128 (antibody solution: diluent). In addition, negative control wells comprising virus diluent but no antibody or solution comprising an antibody can be prepared. The last 50 μL may be discarded. In some cases, this can be done in replicates, for example, of 1, 2, 3, 4, 5, 6, 7, 8, 9, or 10.

[0214] The plate can be covered and placed in an incubator. In some cases, the conditions can be about 37° C. with about 5% CO₂. In some cases, the conditions can be exactly 37° C. with about 5% CO₂. In some cases, the conditions can be about 37° C. with exactly 5% CO₂. In some cases, the conditions can be exactly 37° C. with exactly 5% CO₂. The plate can be held in the incubator during preparation of the diluted virus. In some cases, pH should be maintained to avoid deleterious pH effects on the virus when it is added.

[0215] The virus can be diluted in virus diluent to a working dilution, which can be 100 TCID₅₀/50 μL. TCID₅₀ can be the 50% tissue culture infective dose, and 100 TCID₅₀ can be equal to 100 times the value of TCID₅₀.

[0216] 50 μL of diluted virus can be added to wells containing antibodies and control wells having no antibodies. In some cases, additional control wells having antibody or solution containing antibody, but no virus, can be prepared. In some cases, a row of wells can be reserved for virus back titration. The plate can be mixed gently, and virus diluent can be added to all wells to bring each well to an equal volume. A back titration can be performed using a standard protocol.

[0217] The plate can be covered and again placed in the incubator as described above for 1 hour. After 1 hour, 100 μL of diluted MDCK cells (which should be 70-95% monolayer and low passage<30) can be added to each well of microtiter plates. Each well can contain 1.5×10⁴ cells.

[0218] The plate can be covered and again placed in the incubator as described above for 18-20 hours. After incubation, the liquid can be removed from wells, and wells can be washed, for example, using 200 μL phosphate buffered saline (PBS). 100 μL of cold 80% acetone can be added to each well, and the plate can be incubated at room temperature for 10-12 minutes for fixation. Acetone can be then removed from the wells, and the plate can be dried, for example, by air drying for about 10 minutes or until dry.

[0219] An influenza enzyme linked immunosorbent assay (ELISA) can then be performed using a standard ELISA protocol to determine the amount of virus which has been neutralized. In some cases, an influenza neutralization assay can be performed with the serum of a subject which has been inoculated with a vaccine composition developed according to this disclosure. In some cases, such an influenza neutralization assay can be performed using pig serum, human serum, or the serum of any mammal. In some cases, the serum can comprise antibodies which are head specific antibodies, stem specific antibodies, broadly neutralizing antibodies, universal antibodies, 90% universal antibodies, broadly strain specific antibodies, and/or 90% strain specific antibodies

[0220] In an influenza neutralization assay, control samples from a subject vaccinated with a control vaccine can be included. In such cases, the control vaccine can be a monovalent vaccine, a bivalent vaccine, a trivalent vaccine, or a quadrivalent vaccine. When the control vaccine is a trivalent vaccine, it can comprise antigens from the H1N1 strain, the H3N2 strain, and the HAB strain. In some cases, the minimal neutralizing dilution can be at least 2-fold greater using the developed vaccine than using the control vaccine. In some cases, the minimal neutralizing dilution can be at least 2-fold greater using the developed vaccine than using the control vaccine comprising H1N1, H3N2, and HAB antigens when tested using a hemagglutinin inhibition assay or influenza neutralization. In some cases, the minimal neutralizing dilution can be at least 2-fold greater using the developed vaccine than using the control quadrivalent vaccine when tested using a hemagglutinin inhibition assay or influenza neutralization. In some cases, the minimal neutralizing dilution can be at least 10-fold greater using the developed vaccine than using the control vaccine. In some cases, the minimal neutralizing dilution can be at least 10-fold greater using the developed vaccine than using the control vaccine comprising H1N1, H3N2, and HAB antigens when tested using a hemagglutinin inhibition assay or influenza neutralization. In some cases, the minimal neutralizing dilution can be at least 10-fold greater using the developed vaccine than using the control quadrivalent vaccine when tested using a hemagglutinin inhibition assay or influenza neutralization. In some cases, the minimal neutralizing dilution can be at least 100-fold greater using the developed vaccine than using the control vaccine. In some cases, the minimal neutralizing dilution can be at least 100-fold greater using the developed vaccine than using the control vaccine comprising H1N1, H3N2, and HAB antigens when tested using a hemagglutinin inhibition assay or influenza neutralization. In some cases, the minimal neutralizing dilution can be at least 100-fold greater using the developed vaccine than using the control quadrivalent vaccine when tested using a hemagglutinin inhibition assay or influenza neutralization. In certain cases, the minimal neutralizing dilution can be at least 1,000-fold greater using the developed vaccine than using the control vaccine. In various cases, the minimal neutralizing dilution can be at least 1,000-fold greater using the developed vaccine than using the control vaccine comprising H1N1, H3N2, and HAB antigens when tested using a hemagglutinin inhibition assay or influenza neutralization. In some cases, the minimal neutralizing dilution can be at least 1,000-fold greater using the developed vaccine than using the control quadrivalent vaccine when tested using a hemagglutinin inhibition assay or influenza neutralization. In certain cases, the minimal neutralizing dilution can be at least 10,000-fold greater using the developed vaccine than using the control vaccine. In various cases, the minimal neutralizing dilution can be at least 10,000-fold greater using the developed vaccine than using the control vaccine comprising H1N1, H3N2, and HAB antigens when tested using a hemagglutinin inhibition assay or influenza neutralization. In some cases, the minimal neutralizing dilution can be at least 10,000-fold greater using the developed vaccine than using the control quadrivalent vaccine when tested using a hemagglutinin inhibition assay or influenza neutralization. In certain cases, the improvement in minimal neutralizing dilution can be for one antigen, for more than one antigen, or for all antigens tested. In various cases, the improvement in minimal neutralizing dilution can be for one antigen, for more than one antigen, or for all antigens tested.

[0221] In some cases, the developed vaccine can neutralize more strains than the control vaccine. For example, the developed vaccine can neutralize at least one more strain than the control vaccine. In certain cases, the developed vaccine can neutralize at least 2, at least 5, at least 10, at least 25, at least 50, or at least 100 more strains than the control vaccine. In various cases, the developed vaccine can neutralize at least 2 times, at least 3 times, at least 4 times, at least 5 times, at least 10 times, at least 50 times, at least 100 times, at least 500 times, at least 1,000 times, at least 5,000 times, or at least 10,000 times more strains than the control vaccine.

### Example 7: ELISA Assay

[0222] An ELISA can be used to detect antibodies present in serum directed against an antigen such as a flu antigen. In some embodiments, multiple different antigens (e.g., hemagglutinin variants from various strains) are investigated. Briefly, a hemagglutinin antigen variant can be immobilized in a well of a 96-well plate. In some cases, a dilution series can be prepared. Negative control wells comprising no antigen can be prepared.

[0223] A solution comprising serum suspected of containing hemagglutinin can be incubated in the wells comprising a hemagglutinin antigen variant or control wells. After an incubation period, the solution comprising serum can be washed away. In some cases, if an antibody or antibodies are present in the serum which can react with the hemagglutinin, then antibody will remain bound to the plate.

[0224] A secondary antibody raised against antibodies of the animal from which the serum originated can be applied to the wells. After an incubation period, the secondary antibody can be washed away. Should there be an interaction between the hemagglutinin and an antibody in the serum, secondary antibody can label the hemagglutinin-antibody complex.

[0225] The secondary antibody can be labeled by any acceptable means, and signal can be detected in wells where secondary antibody is present. In some cases, signal can correspond to the amount of secondary antibody present. In some cases, signal can correspond to the amount of antibody of serum-origin present. In some cases, signal can correspond to the amount of hemagglutinin-antibody interaction in a well.

### Example 8: Increasing Average Epitope Breadth Through Conservation-Concentration Coupling

[0226] It was tested whether a vaccination strategy that shifts the probability distribution of epitope conservation in vivo to enrich vaccine-elicited antibodies towards conserved epitopes can be designed.

[0227] Without being bound by any one particular theory, the hypothesis was that it can be possible to selectively reward B cells that can recognize, and can affinity mature towards broadly conserved epitopes by coupling the conservation of these epitopes to their concentration in the vaccine formulation, known as Conservation-Concentration Coupling or C3. By administering a mixture of 30 diverse variants of HA, each individually at a dose which is not sufficient to elicit an effective strain-specific immune response, the dominant population of single variant epitopes can be effectively removed from the distribution. Thus, this would selectively favor B cells that recognize shared epitopes across components, with a broadly reactive B cell receiving up to a 30-fold higher dose than a strain specific B cell.

[0228] FIG. 6 schematically illustrates how C3 works. B cells that carry a receptor that targets a conserved epitope receive a higher relative load of antigen, and thus necessary stimulus to differentiate into plasma cells that can produce antibodies. Other B cells with a receptor that can recognize a strain specific epitope can receive a lower relative load of antigens, which can be below the threshold necessary to initiate an immune response.

### Example 9: Study Design—Conserved Epitope Focusing with Conservation-Concentration Coupling (C3)

[0229] Three in vivo experiments were designed using domesticated outbred pigs (Sus scrofa), a model organism and a veterinary target organism for influenza A infection and vaccination. For the first in vivo study, 35 pigs were split into 5 cohorts with 7 pigs per cohort. Each vaccine (C3) formulation comprised a diverse set of 30 HA variants (H1, H2, H3, H5, and H7 spanning 1918-2014). Cohorts of pigs were inoculated with either a bivalent formulation (BIV, 2 HA antigens H1N1 2007 and H3N2 1997 at 5,000 ng/antigen), C3-500 (30 HA antigens at 500 ng/antigen), C3-100 (30 HA antigens at 100 ng/antigen), C3-50 (30 HA antigens at 50 ng/antigen), or a vehicle control (PBS+squalene). The animals were inoculated 3 times, 3 weeks apart, with sera collection 3-4 weeks after each vaccination (Days 29, 50, and 71). RNA was isolated from PBMCs collected 7 days after the third vaccination (Day 50).

[0230] In the second and third in vivo studies, all HA representatives after 2008 were removed in order to create a “pre-2009” C3 formulation for examining serological response to de facto future viral strains and HAs including pandemic H1N1 2009 through H3N2 2018. A 2008 seasonal bivalent control was similarly formulated, using H1N1 2007 and H3N2 2007.

[0231] For the second in vivo study, 20 pigs were separated into 5 cohorts with 4 pigs per cohort. Cohorts were each inoculated with a formulation comprising either 2 HA antigens at 5,000 ng/antigen (BIV), 27 HA antigens at 50 ng/antigen (C3-50), H1N1 2007 at 50 ng (single low-dose H1), H3N2 2007 at 50 ng (single low-dose H3), or PBS+squalene (vehicle control). Cohorts for single HAs administered at low dose (50 ng) were included to validate a working Lₜₕᵣₑₛₕ (stochiometric limit below which a given antigen does not induce an immune response) in pigs. The animals were each inoculated six times, 21 days apart. Additionally, 3 cohorts (BIV, C3-50, and vehicle control) received a seventh inoculation 9 weeks after sixth inoculation. For C3-50, the seventh inoculation comprised a high-dose boost (27 HA at 500 ng/antigen). Sera were collected immediately prior to each inoculation on the same day. Additional sera were collected 4 weeks after the sixth inoculation (Day 135) and 4 weeks after the seventh inoculation (Day 195). RNA was isolated from peripheral blood mononuclear cells collected 7 days after the sixth inoculation (Day 112).

[0232] For the third in vivo study, 25 pigs were separated into five cohorts with five pigs per cohort. Cohorts were each inoculated with a formulation comprising either 5,000 ng/antigen+squalene (BIV), C3-50+squalene, C3-50+alum, C3-50+TLR, or a vehicle control (PBS+squalene+alum+MPLA+imiquimod. The animals received three inoculations each 21 days apart, with sera collection immediately prior to each inoculation on the same day. Additional sera were collected four weeks after the third inoculation (Day 70). All 3 C3-50 cohorts received 28 HA antigens at 50 ng/antigen for the first two inoculations, and 500 ng/antigen for the third inoculation.

### Example 10: Swarm Effect

[0233] To support the theory of concentration conservation coupling, Lₜₕᵣₑₛₕ was determined in vivo. First, it was determined that a 50 ng dose of HA is under the threshold of immune activation by administering a single antigen, either H1N1 2007 or H3N2 2007, at a dose of 50 ng. Six total doses were administered to pigs 21 days apart (corresponding to the second study in the previous example). In both cases, a sera response was not detected by ELISA to either antigen 28 days after the sixth inoculation, as illustrated in FIG. 7.

[0234] However, when the two antigens are administered in combination with 25 other HAs spanning 1918-2008, also each at 50 ng (C3-50), a sera response to both antigens was detected. Additionally, a C3-50 inoculation resulted in sera responses to other HAs in C3 and a panel of “future” post-2008 strains not included in the formulation, including H1N1, H3N2, H5N1, and H7N9, spanning 2009-2013. Thus, a low-dose ensemble can elicit an immune response even though individual components can be below their threshold dose.

[0235] In this case, in a pool of 27 antigens at individually sub-physiological doses, shared epitopes can be at up to a 27-fold higher dose, and therefore can be successfully targeted and can result in preferentially broad responses that can cross to heterologous strains.

[0236] FIG. 7 illustrates ELISA signals (% max OD_{450 nm}) of individual pig sera to 10 HA antigens (H1, H3, H5, and H7 spanning 1934-2013) across immunization cohorts (each n=4) of C3-50 (27 HAs at 50 ng/HA), single low-dose (50 ng) H1N1 2007 antigen, single low-dose (50 ng) H3N2 2007 antigen, and vehicle control (PBS+squalene). Box and whiskers plots show median and IQR; whiskers show 1.5×IQR of the lower and upper quartiles. Points represent outliers. Antigens shown in the dashed line box indicate HAs present in the 1918-2008 C3 vaccine formulation.

### Example 11: Conservation-Concentration Coupling Responses are Primarily Subtype-Specific and Require a Minimum Total Subtype Antigen Dose

[0237] The analysis of C3-elicted binding response was separated by HA subtype. The C3-50 formulation the first study described in Example 9 contained 10 H1s, 7 H3s, 5 H5s, 3 H7s, and 2 H2s, each individually at 50 ng. Serum responses were correlated to total subtype dose, with H1 and H3 providing the strongest responses, H5 providing a weaker response, and H2 and H7 appearing poorly responded to by C3-50. These results support predictions that responses in one subtype do not necessarily elevate responses to other subtypes. Thus, in some cases broad intra-subtype responses can be much more common than fully universal antibodies. The data suggests a potential minimum clade dose of 7-10 members (i.e., 350-500 ng of the most conserved epitopes) for best effect.

[0238] Data illustrating this experiment is illustrated in FIG. 8. ELISA signals (% max OD_{450 nm}) from pigs of the C3-50 cohort (study #1) are shown separated into the different HA antigen classes present in the C3-50 formulation (H1, H2, H3, H5, and H7). The X-axis shows the number of HAs per class. Sera were collected 28 days after the third vaccination (Day 71). Pearson's correlation coefficient for number of HA antigens versus ELISA signal is shown as R² with corresponding p-value. Box and whiskers plots show median and IQR; whiskers show 1.5×IQR of the lower and upper quartiles. P values are calculated using Kruskal-Wallis rank sum test with Dunn's correction for multiple comparisons. Selected P values are reported as adjusted and indicated as *P<0.05, **P<0.01, ***P<0.001, and ****P<0.0001.

### Example 12: Conservation-Concentration Coupling Broad Reactivity with an Inverse Dose Response

[0239] In some cases, lowering the dose for each individual component may be able to increase the pressure to target only conserved epitopes and thus provide greater breadth of serological response. To evaluate the relationship between dose and response of C3, three dosage cohorts of the C3 were tested alongside BIV and vehicle control groups. Sera responses from each of 7 pigs per cohort from the first study described in Example 9 to a panel of 36 antigens indicate that the lowest dose of C3 (50 ng/HA) provided the highest sera response to the most antigens, spanning H1N1, H1N3, H1N3, H2N2, H3N2, H5N1, H6N2, and H17N10 from 1918-2014. This inverse dose-response is in accordance with model predictions, and a unique property of this vaccination strategy. All three C3 formulations produced an improved median serum response compared to our bivalent formulation as measured by ELISA, as shown in FIG. 9B. Additionally, an inverse dose response was observed where the lowest dose of C3 yielded the highest median serum response as shown in FIG. 9A, and highest fold-change in sera titer over time, from 7 days to 28 days post-third inoculation shown in FIG. 9B, consistent with the model's predictions of conservation-concentration coupling leading to a shift towards breadth by diluting out competing epitopes.

[0240] FIG. 9A illustrates average ELISA signals (% max OD450 nm) per pig across all tested strains (n=36, spanning H1, H2, H3, H5, H7, and H17 ranging from 1918-2014) per pig (study #1). Sera were collected 28 days after the third vaccination (Day 71). FIG. 9B illustrates fold-change of average ELISA signal (% max OD450 nm) per pig from C) between 7 days and 28 days post-third vaccination. Box and whiskers plots show median and IQR; whiskers show 1.5×IQR of the lower and upper quartiles. P values are calculated using Kruskal-Wallis rank sum test with Dunn's correction for multiple comparisons. Selected P values are reported as adjusted and indicated as *P<0.05, **P<0.01, ***P<0.001, and ****P<0.0001.

[0241] When analyzing responses on a per-cohort, per-animal basis, more animals were observed responding more broadly as a function of inverse dose response, with the lowest dose (C3-50 ng/antigen) exhibiting greatest breadth, as shown in the heatmap of FIG. 10.

[0242] FIG. 10 provides a heatmap of ELISA signals (% max OD450 nm) from individual pig sera of 5 immunization cohorts binding against 36 HAs (H1, H2, H3, H5, H6, H7, and H17 spanning 1918-2014) as well as broadly neutralizing human antibodies (C05, F10, and CR9114). Immunization cohorts were three different C3 formulations of 30 HAs at 500 ng/HA, 100 ng/HA, and 50 ng/HA, a BIV cohort (H1N1 2007 and H3N2 1997 each at 5,000 ng) and vehicle control cohort (PBS+squalene). Sera were collected 28 days after the third inoculation (Day 71, study #1). Heatmap shading was adapted using quantile breaks to adjust for the ELISA data distribution. Positive strain coverage was determined as percent values above average of the vehicle control+3×SD for each strain.

[0243] Collectively, data show that breadth of the response is coupled to the concentration of conserved epitopes and that the C3 formulation at the lowest dose of 50 ng/antigen provided the broadest mean strains bound per pig serum in the most pigs.

### Example 13: Conservation-Concentration Coupling Induces Uniform B Cell Expansion

[0244] Next, IgM and IgG B cell receptor (BCR) repertoires of pig peripheral blood mononuclear cells (PBMCs) were analyzed of pigs described in the second study (as described in Example 9), 7 days after the sixth inoculation. In contrast with the high variability in clonal expansion observed among pigs receiving either bivalent or vehicle immunization schedules, significantly more uniform BCR repertoire clonotype expansion were observed in the pigs receiving the C3-50 formulation. Thus, C3 appeared to generate a more uniform, and therefore potentially more predictable, immune response.

[0245] Data illustrating these observations are provided in FIG. 11, as peripheral BCR repertoire occupied by top clonotypes separated by isotype. The black line shows the average repertoire occupied as percent (%) of total sequences for top n clonotypes across pigs per immunization group. The gray area indicates 95% confidence interval Immunization cohorts were from the second in vivo study described in Example 9; a C3 formulation of 27 HAs at 50 ng/HA (n=4), a bivalent cohort (H1N1 2007 and H3N2 2007 each at 5,000 ng, n=3) and vehicle control (PBS+squalene, n=4). Lymphocytes were collected 7 days after sixth inoculation (Day 112). Isotypes were determined by C region specific priming during library preparation. Clonotypes are defined as sequences with identical CDRH3 amino acid sequence.

### Example 14: Conservation-Concentration Coupling Elicits Broadly Neutralizing Antibodies

[0246] To isolate monoclonal pig anti-HA antibodies produced in C3 vaccinated animals, libraries were generated of m13 phage displayed pig antibodies from C3 animals of the first in vivo study described in Example 9. From those libraries, we isolated pig anti-HA antibodies, including the bnAb 9C5, from a pig which received low-dose C3 (50 ng/antigen).

[0247] Data representing the results of this experiment are provided in FIG. 12. Sequence alignment of broadly neutralizing porcine monoclonal antibody 9C5 isolated through phage display. Heavy and Light chain nucleotide sequences were aligned using IMGT V Quest against pig (Sus scrofa) germline genes. Mutations compared to detected germline genes are underlined and the CDRH3 is marked in bold. CDRH3 was reported by IMGT with 7 added amino acid positions 111.1-111.3 and 112.4-112.1 in the IMGT numbering scheme. Phage libraries were constructed from B cell pools per immunization cohort from lymphocytes 7 days post third vaccination (Day 50, study #1) and panned 4 rounds against H3N2 2007 and H1N1 2007. Monoclonal 9C5 was derived from one pig (C3-50 cohort, 30 HAs at 50 ng/HA).

[0248] The data show that C3 antigen formulations can induce broadly neutralizing antibodies, which show improved performance when compared to known human bnAbs. This suggests that the approach provided herein is effectively overcoming the stochastic hurdles of these exceedingly rare epitopes and that antibodies targeting these can be able to broadly neutralize a series of influenza strains, even if they were not part of the original antigen formulation.

[0249] Further, an experiment was performed to determine minimum antibody concentration (ug/mL) sufficient for in vitro neutralization of a panel of 5 Influenza A strains (H1N1/California/2009, H1N1/Michigan/2015, H1N1/Michigan/2017, H3N2/Brisbane/2007, and H3N2/Victoria/2011). Results are provided in FIG. 13. Pig monoclonal 9C5, isolated from one pig (C3-50, in-vivo study #1) using phage display library, was tested as scFv-huFc fusion chimera construct in 2-Ml HEK293 supernatant, quantitated by Protein A standard curve on Octet QK at 32 ug/M1. Shown in comparison to control bnAbs CR9114, F10, and C05 tested for neutralizing capability as purified human IgG1.

### Example 15: Neutralization of “Future” Influenza Strains

[0250] Here it was determined whether C3 formulations elicited neutralizing antibodies through microneutralization assays on sera from pigs inoculated with C3. For sera from the second in vivo study described in Example 9, similar neutralization capacities were observed from sera of both the C3-50 vaccination cohort and the sera of pigs vaccinated with the bivalent control for strains that were part of the bivalent control cohort (H1N1 and H3N2 from 2007). In addition, for tested respective future strains, C3-50 pigs were able to neutralize 5/5 (H1N1 2009, H3N2 2009, H3N2 2011, H3N2 2014, and H1N1 2015) whereas the bivalent control group only showed neutralizing titers against 2/5 (H3N2 2009 and 2011).

[0251] For sera from the third in vivo study described in Example 9, pigs from the bivalent control group neutralized 2/6 strains tested with one “future” virus, H3N2 2009, not part of the formulations. The C3-50 cohorts alum and squalene exhibited improved neutralization, with neutralization against 4/6 and 5/6 strains tested. Both neutralizing 3 and 4 future viruses not part of the C3-50 formulation. Pigs that received C3-50+TLR agonists as adjuvants were unable to neutralize any “future” strains and only neutralized H3N2 2007. Collectively, the data show that C3 formulations administered at 50 ng produce sera with broadly neutralizing capacities at a similar level to that of a bivalent formulation while also neutralizing a broader range of “future” viruses not part of the antigen formulation. Thus, a conservation-concentration coupling approach can focus the immune response towards highly conserved epitopes on the HA coat protein. Moreover, these epitopes can elicit a neutralizing serum response at a similar level to a normal bivalent formulation, and additionally covering viral strains emerging almost a decade of viral evolution later.

[0252] Data illustrating these results are provided in FIG. 14A-14D. FIG. 14A provides ELISA signals (% max OD450 nm) of pig sera from the first in vivo study to 30 HA antigens (H1, H2, H3, H5, H6, H7, and H17 spanning 1918-2014) across immunization cohorts (each n=7 pigs) of C3-50 (30 HAs at 50 ng/HA), BIV cohort (H1N1 2007 and H3N2 1997 each at 5,000 ng) and vehicle control (PBS+squalene). Sera were collected 28 days after the third vaccination (Day 71). Bar represent mean across all pigs of a cohort, error bars indicate positive standard deviation. Arrows indicate HAs not present in the C3 vaccine formulation (in-vivo study #1). Asterisks indicate statistically significant differences between C3-50 and bivalent formulation with adjusted p values<0.05 or lower. P values were determined using strain-wise Wilcoxon Rank Sum test with alternative hypothesis of BIV signals being less than C3-50 signals. Benjamini Hochberg correction was applied to adjust for multiple testing.

[0253] FIG. 14B provides neutralization breadth shown as average number of strains neutralizing per pig by cohort and as number of positive tests per cohort are shown as scatterplot. Sera were collected 28 days after the seventh vaccination (Day 195, study #2). Viruses tested include H1N1/PuertoRico/1934, H1N1/Brisbane/2007, H1N1/California/2009, H1N1/Michigan/2015, H3N2/Brisbane/2007, H3N2/Perth/2009, H3N2/Victoria/2011, and H3N2/HongKong/2014. Sera were not pooled. Cohorts were vehicle control (PBS+squalene), seasonal BIV (H1N1 2007 and H3N2 2007 each at 5,000n g), single low-dose H1 antigen (H1N1 2007, 50 ng) single low-dose H3 antigen (H3N2 2007, 50 ng), and C3-50 (27 HAs at 50 ng/HA), in vivo study #2. Error bars indicate standard deviation.

[0254] FIG. 14C provides neutralization strength for study #2 reported as reciprocal neutralizing dilution per strain across cohorts using bar charts. Bars indicate the mean across all pigs (n=4) of a cohort and error bars indicate standard deviation. “Future” strains tested that are not part of the 2008 C3 formulation are indicated by arrows. Sera were collected 28 days after the 7^{th} vaccination (Day 195).

[0255] FIG. 14D provides neutralization strength for study #3 reported as reciprocal neutralizing dilution per strain across cohorts using bar charts. Bars indicate the mean across all pigs (n=5) of a cohort and error bars indicate standard deviation. Points show the individual value per pig. “Future” strains tested that are not part of the 2008 C3 formulation are indicated by arrows. Sera were collected 28 days after the third vaccination (Day 70). Cohorts were vehicle control (PBS+squalene+TLR-agonist+alum), seasonal BIV (H1N1 2007 and H3N2 2007 each at 5,000 ng+squalene), and 3 cohorts of C3-50 (28 HAs at 50 ng/HA), with squalene, TLR-agonist, and alum adjuvants, respectively.

### Example 16: Selection of 32 Most Diverse HIV Gp160 Sequences for HIV Clade a, B, and C Respectively

[0256] HIV sequences were downloaded from www.hiv.lanl.gov/ and separated into clades. Sequences were filtered by length to exclude sequences shorter than 800 amino acids and sequences from Clade A, B or C (of HIV-1 Group M) selected for further processing.

[0257] Sequences were aligned using hmmalign (HMMER v. 3.0, hmmer.org/) with a custom made HMM profile for HIV gp160 proteins. Next, a pairwise hamming distance matrix was generated using a custom-made python (v. 3.7.2) script. The sequences were subsequently clustered based on the hamming distance matrix using UPGMA clustering (UPGMA: unweighted pair group method with arithmetic mean) implemented in the hclust function of the R (v. 3.6.1) base stats package. The clustered sequences were divided into 32 subclusters using the cutree function of the R (v 3.6.1) base stats package.

[0258] Representative sequences were extracted for each cluster as their medoids using the medoids function of GDAtools (v.1.4). The output for this analysis was 96 amino acid sequences, 32 for each HIV Clade A, B and C. These sequences are SEQ ID NOs:172-267, as listed in Table 9.

### VI. Compositions

[0259] A composition can be a vaccine or a library of antigens from which antigens of a vaccine are selected. A library of antigens can comprise a plurality of antigens. Such a composition can comprise a minimum number of variants of a microbe. In some cases, such a library can comprise at least 1×10¹, at least 1×10², at least 1×10³, at least 1×10⁴, at least 1×10⁵, at least 1×10⁶, at least 1×10⁷, at least 1×10⁸, at least 1×10⁹, or at least 1×10¹⁰ different variants of a microbe.

[0260] A library of antigens can comprise a subset of all known sequences of a microbe. A library comprising more sequences can be considered more complete, and in some embodiments, can be considered more desirable. In some cases, a library can comprise at least 80%, 85%, 90%, or 95% of all known sequences of a microbe.

[0261] Antigens in a vaccine can comprise a specified number of amino acids. In some cases, an antigen in a vaccine can comprise no more than 10, no more than 15, no more than 20, no more than 25, no more than 30, no more than 35, no more than 40, no more than 45, no more than 50, no more than 55, no more than 60, no more than 65, no more than 70, no more than 75, no more than 80, no more than 85, no more than 90, no more than 95, no more than 100, no more than 110, or no more than 120 amino acids. In some cases, an antigen in a vaccine can comprise at least 10, at least 15, at least 20, at least 25, at least 30, at least 35, at least 40, at least 45, at least 50, at least 55, at least 60, at least 65, at least 70, at least 75, at least 80, at least 85, at least 90, at least 95, at least 100, at least 110, or at least 120 amino acids. In some cases, an antigen in a vaccine can comprise from 10 to 120 amino acids, from 10 to 100 amino acids, from 10 to 90 amino acids, from 10 to 80 amino acids, from 10 to 70 amino acids, from 10 to 60 amino acids, from 10 to 50 amino acids, from 10 to 40 amino acids, from 10 to 30 amino acids, from 20 to 120 amino acids, from 20 to 110 amino acids, from 20 to 100 amino acids, from 20 to 90 amino acids, from 20 to 80 amino acids, from 20 to 70 amino acids, from 20 to 60 amino acids, from 20 to 50 amino acids, from 20 to 40 amino acids, from 20 to 30 amino acids, from 30 to 120 amino acids, from 30 to 110 amino acids, from 30 to 100 amino acids, from 30 to 90 amino acids, from 30 to 80 amino acids, from 30 to 70 amino acids, from 30 to 60 amino acids, from 30 to 50 amino acids, from 30 to 40 amino acids, from 40 to 120 amino acids, from 40 to 110 amino acids, from 40 to 100 amino acids, from 40 to 90 amino acids, from 40 to 80 amino acids, from 40 to 70 amino acids, from 40 to 60 amino acids, from 40 to 50 amino acids, from 50 to 120 amino acids, from 60 to 110 amino acids, from 50 to 100 amino acids, from 50 to 90 amino acids, from 50 to 80 amino acids, from 50 to 70 amino acids, from 50 to 60 amino acids, from 60 to 120 amino acids, from 60 to 110 amino acids, from 60 to 100 amino acids, from 60 to 90 amino acids, from 60 to 80 amino acids, from 60 to 70 amino acids, from 70 to 120 amino acids, from 70 to 110 amino acids, from 70 to 100 amino acids, from 70 to 90 amino acids, from 70 to 80 amino acids, from 80 to 120 amino acids, from 80 to 110 amino acids, from 80 to 100 amino acids, from 80 to 90 amino acids, from 90 to 120 amino acids, from 90 to 110 amino acids, from 90 to 100 amino acids, from 100 to 120 amino acids, from 100 to 110 amino acids, or from 110 to 120 amino acids.

[0262] In some cases, an antigen in a vaccine can comprise at least 200, at least 300, at least 400, at least 500, at least 600, at least 700, at least 800, at least 900, or at least 1000 amino acids. In some cases, an antigen in a vaccine can comprise no more than 200, no more than 300, no more than 400, no more than 500, no more than 600, no more than 700, or no more than 800 amino acids. In some cases, an antigen in a vaccine can comprise from 10 to 1000 amino acids, from 10 to 900 amino acids, from 10 to 800 amino acids, from 10 to 700 amino acids, from 10 to 600 amino acids, from 10 to 500 amino acids, from 10 to 400 amino acids, from 10 to 300 amino acids, from 10 to 200 amino acids, from 100 to 1000 amino acids, from 100 to 800 amino acids, from 100 to 700 amino acids, from 100 to 600 amino acids, from 100 to 500 amino acids, from 100 to 400 amino acids, from 100 to 300 amino acids, from 100 to 200 amino acids, from 200 to 1000 amino acids, from 200 to 900 amino acids, from 200 to 800 amino acids, from 200 to 700 amino acids, from 200 to 600 amino acids, from 200 to 500 amino acids, from 200 to 400 amino acids, from 200 to 300 amino acids, from 300 to 1000 amino acids, from 300 to 900 amino acids, from 300 to 800 amino acids, from 300 to 700 amino acids, from 300 to 600 amino acids, from 300 to 500 amino acids, from 300 to 400 amino acids, from 400 to 1000 amino acids, from 400 to 900 amino acids, from 400 to 800 amino acids, from 400 to 700 amino acids, from 400 to 600 amino acids, from 400 to 500 amino acids, from 500 to 1000 amino acids, from 500 to 900 amino acids, from 500 to 800 amino acids, from 500 to 700 amino acids, from 500 to 600 amino acids, from 600 to 1000 amino acids, from 600 to 900 amino acids, from 600 to 800 amino acids, from 600 to 700 amino acids, from 700 to 1000 amino acids, from 700 to 900 amino acids, from 700 to 800 amino acids, from 800 to 1000 amino acids, from 800 to 900 amino acids, or from 900 to 1000 amino acids.

[0263] A vaccine can comprise a specified number of antigens. The antigens in a vaccine can be selected for inclusion based on the total number of antigens available, similarity to pathogenic strains, similarity to other included antigens, or differences from other included antigens. Vaccines herein can comprise a set of antigens which can comprise at least 5, at least 6, at least 7, at least 8, at least 9, at least 10, at least 15, at least 20, at least 30, at least 40, at least 50, at least 60, at least 70, at least 80, at least 90, at least 100, at least 200, at least 300, at least 400, at least 500, at least 600, at least 700, at least 800, at least 900, or at least 1000 different antigens. In selected cases, a vaccine can comprise at least 30 antigens. In some cases, a vaccine can comprise a set of antigens which can comprise no more than 5, no more than 6, no more than 7, no more than 8, no more than 9, no more than 10, no more than 15, no more than 20, no more than 30, no more than 40, no more than 50, no more than 60, no more than 70, no more than 80, no more than 90, no more than 100, no more than 200, no more than 300, no more than 400, no more than 500, no more than 600, no more than 700, no more than 800, no more than 900, or no more than 1000 different antigens. In selected cases, a vaccine can comprise no more than 30 antigens. In some cases, a vaccine can comprise from 5 to 1000, from 5 to 900, from 5 to 800, from 5 to 700, from 5 to 600, from 5 to 500, from 5 to 400, from 5 to 300, from 5 to 200, from 5 to 100, from 5 to 90, from 5 to 80, from 5 to 70, from 5 to 60, from 5 to 50, from 5 to 40, from 5 to 30, from 5 to 20, from 5 to 10, from 10 to 1000, from 10 to 900, from 10 to 800, from 10 to 700, from 10 to 600, from 10 to 500, from 10 to 400, from 10 to 300, from 10 to 200, from 10 to 100, from 10 to 90, from 10 to 80, from 10 to 70, from 10 to 60, from 10 to 50, from 10 to 40, from 10 to 30, from 10 to 20, from 20 to 1000, from 20 to 900, from 20 to 800, from 20 to 700, from 20 to 600, from 20 to 500, from 20 to 400, from 20 to 300, from 20 to 200, from 20 to 100, from 20 to 90, from 20 to 80, from 20 to 70, from 20 to 60, from 20 to 50, from 20 to 40, from 20 to 30, from 30 to 1000, from 30 to 900, from 30 to 800, from 30 to 700, from 30 to 600, from 30 to 500, from 30 to 400, from 30 to 300, from 30 to 200, from 30 to 100, from 30 to 90, from 30 to 80, from 30 to 70, from 30 to 60, from 30 to 50, from 30 to 40, from 40 to 1000, from 40 to 900, from 40 to 800, from 40 to 700, from 40 to 600, from 40 to 500, from 40 to 400, from 40 to 300, from 40 to 200, from 40 to 100, from 40 to 90, from 40 to 80, from 40 to 70, from 40 to 60, from 40 to 50, from 50 to 1000, from 50 to 900, from 50 to 800, from 50 to 700, from 50 to 600, from 50 to 500, from 50 to 400, from 50 to 300, from 50 to 200, from 50 to 100, from 50 to 90, from 50 to 80, from 50 to 70, from 50 to 60, from 100 to 1000, from 100 to 900, from 100 to 800, from 100 to 700, from 100 to 600, from 100 to 500, from 100 to 400, from 100 to 300, from 100 to 200, from 200 to 1000, from 200 to 900, from 200 to 800, from 200 to 700, from 200 to 600, from 200 to 500, from 200 to 400, from 200 to 300, from 300 to 1000, from 300 to 900, from 300 to 800, from 300 to 700, from 300 to 600, from 300 to 500, from 300 to 400, from 400 to 1000, from 400 to 900, from 400 to 800, from 400 to 700, from 400 to 600, from 400 to 500, from 500 to 1000, from 500 to 900, from 500 to 800, from 500 to 700, from 500 to 600, from 600 to 1000, from 600 to 900, from 600 to 800, from 600 to 700, from 700 to 1000, from 700 to 900, from 700 to 800, from 800 to 1000, from 800 to 900, or from 800 to 1000 different antigens.

[0264] In some cases, an intact antigen can be divided into functional fragments, or parts, of the whole antigen, for example, at least 2, at least 3, at least 4, at least 5, at least 6, at least 7, at least 8, at least 9, at least 10, at least 11, at least 12, at least 13, at least 14, at least 15, at least 16, at least 17, at least 18, at least 19, at least 20, at least 21, at least 22, at least 23, at least 24, at least 25, at least 30, at least 35, at least 40, at least 45, at least 50, at least 55, at least 60, at least 65, at least 70, at least 75, at least 80, at least 85, at least 90, at least 95 or at least 100 portions (e.g., pieces or fragments), inclusive, and where each individual functional fragment of the antigen can be associated with the polymer according to the methods as disclosed herein. In some cases the antigen may be divided into at most 2, at most 3, at most 4, at most 5, at most 6, at most 7, at most 8, at most 9, at most 10, at most 11, at most 12, at most 13, at most 14, at most 15, at most 16, at most 17, at most 18, at most 19, at most 20, at most 21, at most 22, at most 23, at most 24, at most 25, at most 30, at most 35, at most 40, at most 45, at most 50, at most 55, at most 60, at most 65, at most 70, at most 75, at most 80, at most 85, at most 90, at most 95, or at most 100 portions (e.g., pieces or fragments), inclusive.

[0265] In some cases, a broadly conserved sequence can be at least 40% conserved across a set of strains of a microbe (e.g., at least 10% of strains, at least 25% of strains, at least 50% of strains, at least 75% of strains, at least 90% of strains, at least 95% of strains, or all strains of a microbe). In some cases, a broadly conserved sequence can be a sequence that has limited variation across species or strains of a microbe. A sequence that is conserved across a plurality of microbes. can be the same or substantially the same across a plurality of microbes. For example, a sequence that is 40%, 50%, 60%, 70%, 80%, 90%, or 100% conserved can have structural or sequence identity of 40%, 50%, 60%, 70%, 80%, 90%, or 100% across a set of microbes.

[0266] In certain cases, a broadly conserved sequence can be at least 50% conserved across a set of strains of a microbe (e.g., at least 10% of strains, at least 25% of strains, at least 50% of strains, at least 75% of strains, at least 90% of strains, at least 95% of strains, or all strains of a microbe). In various cases, a broadly conserved sequence can be at least 60% conserved across a set of strains of a microbe (e.g., at least 10% of strains, at least 25% of strains, at least 50% of strains, at least 75% of strains, at least 90% of strains, at least 95% of strains, or all strains of a microbe). In some cases, a broadly conserved sequence can be at least 70% conserved across a set of strains of a microbe (e.g., at least 10% of strains, at least 25% of strains, at least 50% of strains, at least 75% of strains, at least 90% of strains, at least 95% of strains, or all strains of a microbe). In certain cases, a broadly conserved sequence can be at least 80% conserved across a set of strains of a microbe (e.g., at least 10% of strains, at least 25% of strains, at least 50% of strains, at least 75% of strains, at least 90% of strains, at least 95% of strains, or all strains of a microbe). In various cases, a broadly conserved sequence can be at least 90% conserved across a set of strains of a microbe (e.g., at least 10% of strains, at least 25% of strains, at least 50% of strains, at least 75% of strains, at least 90% of strains, at least 95% of strains, or all strains of a microbe).

[0267] An antigen can be representative of a clade if its sequence can be up to 10% of the average size of antigens of the represented clade different than other members of the represented clade. In some cases, an antigen can be representative of a clade if its sequence is up to 15%, up to 20%, up to 25%, or up to 30% of the average size of antigens of the represented clade different than other members of the represented clade.

[0268] An antigen can be representative of a clade if its sequence is no more than 75% of the average size of antigens of the represented clade different than other members of the represented clade. In some clade, an antigen can be representative of a clade if its sequence is no more than 50%, no more than 55%, no more than 60%, no more than 65%, no more than 70%, no more than 75%, no more than 80%, no more than 85%, no more than 90%, or no more than 95% different than other members of the represented clade.

[0269] An antigen can be representative of a clade if its sequence is up to 5, up to 10, up to 15, up to 20, up to 25, up to 30, up to 35, up to 40, up to 45, up to 50, up to 55, up to 60, up to 70, up to 80, up to 90, up to 100, up to 150, up to 200, up to 250, or up to 300 amino acids different from a subset of strains of the represented clade. In some cases, an antigen can be representative of a clade if its sequence is up to 5, up to 10, up to 15, up to 20, up to 25, up to 30, up to 35, up to 40, up to 45, up to 50, up to 55, up to 60, up to 70, up to 80, up to 90, up to 100, up to 150, up to 200, up to 250, or up to 300 amino acids different from at least 50% of strains of the represented clade. In some cases, an antigen can be representative of a clade if its sequence is up to 5, up to 10, up to 15, up to 20, up to 25, up to 30, up to 35, up to 40, up to 45, up to 50, up to 55, up to 60, up to 70, up to 80, up to 90, up to 100, up to 150, up to 200, up to 250, or up to 300 amino acids different from at least 60% of strains of the represented clade. In some cases, an antigen can be representative of a clade if its sequence is up to 5, up to 10, up to 15, up to 20, up to 25, up to 30, up to 35, up to 40, up to 45, up to 50, up to 55, up to 60, up to 70, up to 80, up to 90, up to 100, up to 150, up to 200, up to 250, or up to 300 amino acids different from at least 70% of strains of the represented clade. In some cases, an antigen can be representative of a clade if its sequence is up to 5, up to 10, up to 15, up to 20, up to 25, up to 30, up to 35, up to 40, up to 45, up to 50, up to 55, up to 60, up to 70, up to 80, up to 90, up to 100, up to 150, up to 200, up to 250, or up to 300 amino acids different from at least 80% of strains of the represented clade. In some cases, an antigen can be representative of a clade if its sequence is up to 5, up to 10, up to 15, up to 20, up to 25, up to 30, up to 35, up to 40, up to 45, up to 50, up to 55, up to 60, up to 70, up to 80, up to 90, up to 100, up to 150, up to 200, up to 250, or up to 300 amino acids different from at least 90% of strains of the represented clade. In some cases, an antigen can be representative of a clade if its sequence is up to 5, up to 10, up to 15, up to 20, up to 25, up to 30, up to 35, up to 40, up to 45, up to 50, up to 55, up to 60, up to 70, up to 80, up to 90, up to 100, up to 150, up to 200, up to 250, or up to 300 amino acids different from all strains of the represented clade.

[0270] An antigen can be representative of a clade if its edit distance is up to 5% of the average size of antigens of the represented clade. In some cases, an antigen can be representative of a clade if its edit distance is up to 10%, up to 15%, or up to 20% of the average size of antigens of the represented clade. An antigen can be representative of a clade if its sequence is up to 10% of the average size of antigens of the represented clade different than at least 95%, at least 96%, at least 97%, at least 98%, or at least 99% of all strains of the represented clade. In some cases, an antigen can be representative of a clade if its sequence is up to 15% of the average size of antigens of the represented clade different than at least 95%, at least 96%, at least 97%, at least 98%, or at least 99% of all strains of the represented clade. In some cases, an antigen can be representative of a clade if its sequence is up to 20% of the average size of antigens of the represented clade different than at least 95%, at least 96%, at least 97%, at least 98%, or at least 99% of all strains of the represented clade.

[0271] An antigen can be representative of a clade if its edit distance is no more than 75% of the average size of antigens of the represented clade. In some cases, an antigen can be representative of a clade if its edit distance is no more than 70%, no more than 80%, no more than 90%, no more than 95%, or no more than 99% of the average size of antigens of the represented clade.

[0272] An antigen can be representative of a clade if its sequence is no more than 90% of the average size of antigens of the represented clade different than at least 95%, at least 96%, at least 97%, at least 98%, or at least 99% of all strains of the represented clade. In some cases, an antigen can be representative of a clade if its sequence is no more than 80% of the average size of antigens of the represented clade different than at least 95%, at least 96%, at least 97%, at least 98%, or at least 99% of all strains of the represented clade. In some cases, an antigen can be representative of a clade if its sequence is no more than 70% of the average size of antigens of the represented clade different than at least 95%, at least 96%, at least 97%, at least 98%, or at least 99% of all strains of the represented clade.

[0273] An antigen can be representative of a clade if its edit distance is up to 5% of the average size of at least 95%, at least 96%, at least 97%, at least 98%, or at least 99% of all strains of the represented clade. In some cases, an antigen can be representative of a clade if its edit distance is up to 10% of the average size of at least 95%, at least 96%, at least 97%, at least 98%, or at least 99% of all strains of the represented clade. In some cases, an antigen can be representative of a clade if its edit distance is up to 15% of the average size of at least 95%, at least 96%, at least 97%, at least 98%, or at least 99% of all strains of the represented clade.

[0274] An antigen can be representative of a clade if its edit distance is up to no more than 90% of the average size of at least 95%, at least 96%, at least 97%, at least 98%, or at least 99% of all strains of the represented clade. In some cases, an antigen can be representative of a clade if its edit distance is no more than 80% of the average size of at least 95%, at least 96%, at least 97%, at least 98%, or at least 99% of all strains of the represented clade. In some cases, an antigen can be representative of a clade if its edit distance is no more than 70% of the average size of at least 95%, at least 96%, at least 97%, at least 98%, or at least 99% of all strains of the represented clade.

[0275] Some vaccines can comprise antigens having an average edit distance from each of the other antigens which is at least 5% of the average size of antigens in the clade. Some vaccines can comprise antigens having an average edit distance from at least one of the other antigens which is at least 1%, at least 2%, at least 3%, at least 4%, at least 5%, at least 6%, at least 7%, at least 8%, at least 9%, at least 10%, at least 15%, at least 20%, or at least 25% of the average size of antigens in the clade. In such vaccines, some vaccines can comprise antigens having an average edit distance from each of the other antigens which is at least 1%, at least 2%, at least 3%, at least 4%, at least 5%, at least 6%, at least 7%, at least 8%, at least 9%, at least 10%, at least 15%, at least 20%, or at least 25% of the average size of antigens in the clade. In such vaccines, the actual edit distances can be varied, or can be similar. In some cases, no antigens will have an actual edit distance which is exactly at least 5% of the average size of antigens in the clade.

[0276] In some cases, the smallest pairwise edit distance between two or more of the antigens in the set may be no more than 1. In some cases, the smallest pairwise edit distance between two or more of the antigens in the set may be no more than 2, no more than 3, no more than 4, no more than 5, no more than 6, no more than 7, no more than 8, no more than 9, no more than 10, no more than 20, no more than 30, no more than 40, or no more than 50. In some cases, the smallest pairwise edit distance between two or more of the antigens in the set can be at least 1. In some cases, the smallest pairwise edit distance between two or more of the antigens in the set can be at least 2, at least 3, at least 4, at least 5, at least 6, at least 7, at least 8, at least 9, at least 10, at least 20, at least 30, at least 40, or at least 50.

[0277] In some cases, the smallest pairwise edit distance can be no more than about 1%, no more than about 2%, no more than about 3%, no more than about 4%, no more than about 5%, no more than about 6%, no more than about 7%, no more than about 8%, no more than about 9%, no more than about 10%, no more than about 15%, no more than about 20%, or no more than about 25% of the size of the antigens. In some cases, the smallest pairwise edit distance can be at least about 5% of the size of the antigens. In some cases, the smallest pairwise edit distance can be at least about 1%, at least about 2%, at least about 3%, at least about 4%, at least about 5%, at least about 6%, at least about 7%, at least about 8%, at least about 9%, at least about 10%, at least about 15%, at least about 20%, or at least about 25% of the size of the antigens.

[0278] In some cases, the largest pairwise edit distance can be at least 5, at least 10, at least 20, at least 30, at least 40, at least 50, at least 60, at least 70, at least 80, at least 90, at least 100, at least 150, at least 200, at least 250, at least 300, at least 350, at least 400, at least at least 450, at least 500, at least 550, at least 600, at least 700, or at least 800. In some cases, the largest pairwise edit distance can be no more than 5, no more than 10, no more than 20, no more than 30, no more than 40, no more than 50, no more than 60, no more than 70, no more than 80, no more than 90, no more than 100, no more than 150, no more than 200, no more than 250, no more than 300, no more than 350, no more than 400, no more than 450, no more than 500, no more than 550, no more than 600, no more than 700, or no more than 800.

[0279] In some cases, the largest pairwise edit distance can be no more than about 75% of the size of the antigens. In some cases, the largest pairwise edit distance can be no more than about 50%, no more than about 55%, no more than about 60%, no more than about 65%, no more than about 70%, no more than about 75%, no more than about 80%, no more than about 85%, no more than about 90%, or no more than about 95% of the size of the antigens. In some cases, the largest pairwise edit distance can be at least about 75% of the size of the antigens. In some cases, the largest pairwise edit distance can be at least about 50%, at least about 55%, at least about 60%, at least about 65%, at least about 70%, at least about 75%, at least about 80%, at least about 85%, at least about 90% or at least about 95% of the size of the antigens.

[0280] In some cases, the smallest pairwise edit distance between two or more of the antigens in the set can be no more than 1, and the largest pairwise edit distance can be at least 5, at least 10, at least 20, at least 30, at least 40, at least 50, at least 60, at least 70, at least 80, at least 90, at least 100, at least 200, at least 300, at least 400, at least 500, at least 600, at least 700, or at least 800. In some cases, the smallest pairwise edit distance between two or more of the antigens in the set can be at least 1, and the largest pairwise edit distance can be at least 5, at least 10, at least 20, at least 30, at least 40, at least 50, at least 60, at least 70, at least 80, at least 90, at least 100, at least 200, at least 300, at least 400, at least 500, at least 600, at least 700, or at least 800. In some cases, the smallest pairwise edit distance between two or more of the antigens in the set can be at least 1, and the largest pairwise edit distance can be no more than 5, no more than 10, no more than 20, no more than 30, no more than 40, no more than 50, no more than 60, no more than 70, no more than 80, no more than 90, no more than 100, no more than 200, no more than 300, no more than 400, no more than 500, no more than 600, no more than 700, or no more than 800. In some cases, the smallest pairwise edit distance between two or more of the antigens in the set can be no more than 1, and the largest pairwise edit distance can be no more than 5, no more than 10, no more than 20, no more than 30, no more than 40, no more than 50, no more than 60, no more than 70, no more than 80, no more than 90, no more than 100, no more than 200, no more than 300, no more than 400, no more than 500, no more than 600, no more than 700, or no more than 800.

[0281] In some cases, the smallest pairwise edit distance between two or more of the antigens in the set can be no more than about 1%, and the largest pairwise edit distance can be at least about 75%. In some cases, the smallest pairwise edit distance between two or more of the antigens in the set can be at least about 1%, and the largest pairwise edit distance can be at least about 75%. In some cases, the smallest pairwise edit distance between two or more of the antigens in the set can be at least about 1%, and the largest pairwise edit distance can be no more than 75%. In some cases, the smallest pairwise edit distance between two or more of the antigens in the set can be no more than about 1%, and the largest pairwise edit distance can be no more than about 75%.

[0282] In some cases, the smallest pairwise edit distance between two or more of the antigens in the set can be no more than about 5%, and the largest pairwise edit distance can be at least about 75%. In some cases, the smallest pairwise edit distance between two or more of the antigens in the set can be at least about 5%, and the largest pairwise edit distance can be at least about 75%. In some cases, the smallest pairwise edit distance between two or more of the antigens in the set can be at least about 5%, and the largest pairwise edit distance can be no more than 75%. In some cases, the smallest pairwise edit distance between two or more of the antigens in the set can be no more than about 5%, and the largest pairwise edit distance can be no more than about 75%.

[0283] In some cases, the smallest pairwise edit distance between two or more of the antigens in the set can be no more than about 20%, and the largest pairwise edit distance can be at least about 75%. In some cases, the smallest pairwise edit distance between two or more of the antigens in the set can be at least about 20%, and the largest pairwise edit distance can be at least about 75%. In some cases, the smallest pairwise edit distance between two or more of the antigens in the set can be at least about 20%, and the largest pairwise edit distance can be no more than 75%. In some cases, the smallest pairwise edit distance between two or more of the antigens in the set can be no more than about 20%, and the largest pairwise edit distance can be no more than about 75%.

[0284] In some cases, the smallest pairwise edit distance between two or more of the antigens in the set can be no more than about 1%, and the largest pairwise edit distance can be at least about 90%. In some cases, the smallest pairwise edit distance between two or more of the antigens in the set can be at least about 1%, and the largest pairwise edit distance can be at least about 90%. In some cases, the smallest pairwise edit distance between two or more of the antigens in the set can be at least about 1%, and the largest pairwise edit distance can be no more than 90%. In some cases, the smallest pairwise edit distance between two or more of the antigens in the set can be no more than about 1%, and the largest pairwise edit distance can be no more than about 90%.

[0285] In some cases, the smallest pairwise edit distance between two or more of the antigens in the set can be no more than about 5%, and the largest pairwise edit distance can be at least about 90%. In some cases, the smallest pairwise edit distance between two or more of the antigens in the set can be at least about 5%, and the largest pairwise edit distance can be at least about 90%. In some cases, the smallest pairwise edit distance between two or more of the antigens in the set can be at least about 5%, and the largest pairwise edit distance can be no more than 90%. In some cases, the smallest pairwise edit distance between two or more of the antigens in the set can be no more than about 5%, and the largest pairwise edit distance can be no more than about 90%.

[0286] In some cases, the smallest pairwise edit distance between two or more of the antigens in the set can be no more than about 20%, and the largest pairwise edit distance can be at least about 90%. In some cases, the smallest pairwise edit distance between two or more of the antigens in the set can be at least about 20%, and the largest pairwise edit distance can be at least about 90%. In some cases, the smallest pairwise edit distance between two or more of the antigens in the set can be at least about 20%, and the largest pairwise edit distance can be no more than 90%. In some cases, the smallest pairwise edit distance between two or more of the antigens in the set can be no more than about 20%, and the largest pairwise edit distance can be no more than about 90%.

[0287] A vaccine can comprise a set of antigens wherein the smallest pairwise edit distance between the two of the antigens can be no more than 1%, no more than 2%, no more than 3%, no more than 4%, no more than 5%, no more than 6%, no more than 7%, no more than 8%, no more than 9%, no more than 10%, no more than 11%, no more than 12%, no more than 13%, no more than 14%, no more than 15%, no more than 16%, no more than 17%, no more than 18%, no more than 19%, or no more than 10% inclusive. A vaccine can comprise a set of antigens wherein the smallest pairwise edit distance between the two of the antigens can be at least 1%, at least 2%, at least 3%, at least 4%, at least 5%, at least 6%, at least 7%, at least 8%, at least 9%, at least 10%, at least 11%, at least 12%, at least 13%, at least 14%, at least 15%, at least 16%, at least 17%, at least 18%, at least 19%, or at least 10% inclusive. A vaccine can comprise a set of antigens wherein the largest pairwise edit distance between two of the antigens can be at least 50%, at least 55%, at least 60%, at least 65%, at least 70%, at least 75%, at least 80%, at least 85%, at least 90%, or at least 95%, inclusive. A vaccine can comprise a set of antigens wherein the largest pairwise edit distance between two of the antigens can be no more than 50%, no more than 55%, no more than 60%, no more than 65%, no more than 70%, no more than 75%, no more than 80%, no more than 85%, no more than 90%, or no more than 95%, inclusive.

[0288] In some cases, each antigen in a set can share at least 90%, at least 95%, or at least 99% sequence identity to at least one antigen in the set over a length of at least 100 amino acids. In some cases, each antigen in a set can share at least 90%, at least 95%, or at least 99% sequence identity to at least one antigen in the set over a length of at least 300 amino acids. In some cases, each antigen in a set can share at least 90%, at least 95%, or at least 99% sequence identity to at least one antigen in the set over a length of at least 500 amino acids.

[0289] A vaccine can comprise antigens in a set which differ from other antigens in the set by at least 1%, at least 5%, or at least 10% sequence identity. In some cases, a vaccine can comprise antigens in a set which differ from all other antigens in the set by at least 1%, at least 5%, or at least 10% sequence identity.

[0290] A vaccine can comprise antigens in a set which differ from at least one other antigen in the set by no more than 75% sequence identity. In some cases, a vaccine can comprise antigens in a set which differ from all other antigens in the set by no more than 75% sequence identity.

[0291] A vaccine can comprise a set of antigens that are representative of at least 40%, at least 45%, at least 50%, at least 55%, at least 60%, at least 65%, at least 70%, at least 75%, at least 80%, at least 85%, or at least 90% of fifth order clades of a microbe. In some cases, vaccine can comprise a set of antigens that are representative of at least 40%, at least 45%, at least 50%, at least 55%, at least 60%, at least 65%, at least 70%, at least 75%, at least 80%, at least 85%, or at least 90% of sixth order clades of a microbe. In further cases, vaccine can comprise a set of antigens that are representative of at least 40%, at least 45%, at least 50%, at least 55%, at least 60%, at least 65%, at least 70%, at least 75%, at least 80%, at least 85%, or at least 90% of seventh order clades of a microbe. In some cases, a vaccine can comprise a set of antigens that are representative of at least 40%, at least 45%, at least 50%, at least 55%, at least 60%, at least 65%, at least 70%, at least 75%, at least 80%, at least 85%, or at least 90% of eighth order clades of a microbe. In some cases, a vaccine can comprise a set of antigens that are representative of at least 40%, at least 45%, at least 50%, at least 55%, at least 60%, at least 65%, at least 70%, at least 75%, at least 80%, at least 85%, or at least 90% of ninth order clades of a microbe. In some cases, a vaccine can comprise a set of antigens that are representative of at least 40%, at least 45%, at least 50%, at least 55%, at least 60%, at least 65%, at least 70%, at least 75%, at least 80%, at least 85%, or at least 90% of tenth order clades of a microbe. In some cases, a vaccine can comprise a set of antigens that are representative of at least 40%, at least 45%, at least 50%, at least 55%, at least 60%, at least 65%, at least 70%, at least 75%, at least 80%, at least 85%, or at least 90% of eleventh order clades of a microbe. In some cases, a vaccine can comprise a set of antigens that are representative of at least 40%, at least 45%, at least 50%, at least 55%, at least 60%, at least 65%, at least 70%, at least 75%, at least 80%, at least 85%, or at least 90% of twelfth order clades a microbe. In some cases, a vaccine can comprise a set of antigens that are representative of at least 40%, at least 45%, at least 50%, at least 55%, at least 60%, at least 65%, at least 70%, at least 75%, at least 80%, at least 85%, or at least 90% of thirteenth order clades of a microbe. In some cases, a vaccine can comprise a set of antigens that are representative of at least 40%, at least 45%, at least 50%, at least 55%, at least 60%, at least 65%, at least 70%, at least 75%, at least 80%, at least 85%, or at least 90% of fourteenth order clades of a microbe. In some cases, a vaccine can comprise a set of antigens that are representative of at least 40%, at least 45%, at least 50%, at least 55%, at least 60%, at least 65%, at least 70%, at least 75%, at least 80%, at least 85%, or at least 90% of fifteenth order clades of a microbe. In some cases, a vaccine can comprise a set of antigens that are representative of at least 40%, at least 45%, at least 50%, at least 55%, at least 60%, at least 65%, at least 70%, at least 75%, at least 80%, at least 85%, or at least 90% of twentieth order clades of a microbe In some cases, a vaccine can comprise a set of antigens that are representative of at least 40%, at least 45%, at least 50%, at least 55%, at least 60%, at least 65%, at least 70%, at least 75%, at least 80%, at least 85%, or at least 90% of twenty-fifth order clades of a microbe. In some cases, a vaccine can comprise a set of antigens that are representative of at least 40%, at least 45%, at least 50%, at least 55%, at least 60%, at least 65%, at least 70%, at least 75%, at least 80%, at least 85%, or at least 90% of thirtieth order clades of a microbe.

[0292] A vaccine can comprise antigens that are representative of at least 60% of each of the third, fourth, fifth, sixth, seventh, eighth, ninth, tenth, eleventh, twelfth, thirteenth, fourteenth, fifteenth, or other suitable order clades of a microbe. In some cases, a vaccine can comprise antigens that are representative of at least 70% of each of the third, fourth, fifth, sixth, seventh, eighth, ninth, tenth, eleventh, twelfth, thirteenth, fourteenth, fifteenth, or other suitable order clades of a microbe. In further cases, a vaccine can comprise antigens that are representative of at least 80% of each of the third, fourth, fifth, sixth, seventh, eighth, ninth, tenth, eleventh, twelfth, thirteenth, fourteenth, fifteenth, or other suitable order clades of a microbe. In yet further cases, a vaccine can comprise antigens that are representative of at least 90% of each of the third, fourth, fifth, sixth, seventh, eighth, ninth, tenth, eleventh, twelfth, thirteenth, fourteenth, fifteenth, or other suitable order clades of a microbe.

[0293] The smallest number of branches between any 2 antigens can be 1 in some vaccines. The largest number of branches between any two antigens can be at least 5, at least 10, at least 15, or at least 20. In some vaccines, the smallest number of branches between any 2 antigens can be 1 and the largest number of branches between any two antigens can be at least 5. In some vaccines, the smallest number of branches between any 2 antigens can be 1 and the largest number of branches between any two antigens can be at least 10. In some vaccines, the smallest number of branches between any 2 antigens can be 1 and the largest number of branches between any two antigens can be at least 15. In some vaccines, the smallest number of branches between any 2 antigens can be 1 and the largest number of branches between any two antigens can be at least 20. In some vaccines, the smallest number of branches between any 2 antigens can be less than 5 and the largest number of branches between any two antigens can be at least 5. In some vaccines, the smallest number of branches between any 2 antigens can be less than 5 and the largest number of branches between any two antigens can be at least 10. In some vaccines, the smallest number of branches between any 2 antigens can be less than 5 and the largest number of branches between any two antigens can be at least 15. In some vaccines, the smallest number of branches between any 2 antigens can be less than 5 and the largest number of branches between any two antigens can be at least 20. In some vaccines, the smallest number of branches between any 2 antigens can be less than 10 and the largest number of branches between any two antigens can be at least 10. In some vaccines, the smallest number of branches between any 2 antigens can be less than 10 and the largest number of branches between any two antigens can be at least 15. In some vaccines, the smallest number of branches between any 2 antigens can be less than 10 and the largest number of branches between any two antigens can be at least 20.

[0294] A vaccine which is a flu vaccine can comprise antigens selected from Table 2, or a fragment or homologue thereof. If a vaccine comprises a fragment or homologue of an antigen, the fragment or homologue can be of at least a certain size. In some cases, a fragment or homologue can be at least 10, at least 15, at least 20, at least 25, at least 30, at least 35, at least 40, at least 45, at least 50, at least 55, at least 60, at least 65, at least 70, at least 75, at least 80, at least 85, at least 90, at least 95, at least 100, at least 110, at least 120, at least 150, at least 200, at least 300, at least 400, at least 500, at least 600, at least 700, at least 800, at least 900, or at least 1000 amino acids. In some cases, a fragment or homologue can be at most 10, at most 15, at most 20, at most 25, at most 30, at most 35, at most 40, at most 45, at most 50, at most 55, at most 60, at most 65, at most 70, at most 75, at most 80, at most 85, at most 90, at most 95, at most 100, at most 110, or at most 120 amino acids, at most 150 amino acids, at most 200 amino acids, at most 300 amino acids, at most 400 amino acids, at most 500 amino acids, at most 600 amino acids, at most 700 amino acids, at most 800 amino acids, at most 900 amino acids, or at most 1000 amino acids.

[0295] In some cases, an antigen in a vaccine can be selected from SEQ ID NOs:1-87. In some cases, an antigen in a vaccine can be at least about 40%, at least about 45%, at least about 50%, at least about 55%, at least about 60%, at least about 65%, at least about 70%, at least about 75%, at least about 80%, at least about 90%, or at least about 95% identical to a sequence selected from SEQ ID NOs:1-87.

[0296] In some cases, an antigen in a vaccine can be selected from SEQ ID NOs:88-127. In some cases, an antigen in a vaccine can be at least about 40%, at least about 45%, at least about 50%, at least about 55%, at least about 60%, at least about 65%, at least about 70%, at least about 75%, at least about 80%, at least about 90%, or at least about 95% identical to a sequence selected from SEQ ID NOs:88-127.

[0297] In some cases, an antigen in a vaccine can be selected from SEQ ID NOs:128-171. In some cases, an antigen in a vaccine can be at least about 40%, at least about 45%, at least about 50%, at least about 55%, at least about 60%, at least about 65%, at least about 70%, at least about 75%, at least about 80%, at least about 90%, or at least about 95% identical to a sequence selected from SEQ ID NOs:128-171.

[0298] In some cases, an antigen in a vaccine can be selected from SEQ ID NOs:172-267. In some cases, an antigen in a vaccine can be at least about 40%, at least about 45%, at least about 50%, at least about 55%, at least about 60%, at least about 65%, at least about 70%, at least about 75%, at least about 80%, at least about 90%, or at least about 95% identical to a sequence selected from SEQ ID NOs:172-267.

TABLE 6
Amino acid sequences of hemagglutinin antigens that can be included in
a flu vaccine

| SEQ | |
|---|---|
| ID | Sequence |
| 1 | EDTICIGYHANNSTDTVDTVLEKNVTVTHSVNLLEDSHNGKLCKLKGIAPLQL |
| | GKCNIAGWLLGNPECDLLLTASSWSYIVETSNSENGTCYPGDFIDYEELREQL |
| | SSVSSFEKFEIFPKTSSWPNHETTKGVTAACSYAGASSFYRNLLWLTKKGSSY |
| | PKLSKSYVNNKGKEVLVLWGVHHPPTGTDQQSLYQNADAYVSVGSSKYNRR |
| | FTPEIAARPKVRDQAGRMNYYWTLLEPGDTITFEATGNLIAPWYAFALNRGS |
| | GSGIITSDAPVHDCNTKCQTPHGAINSSLPFQNIHPVTIGECPKYVRSTKLRMA |
| | TGLRNIPSIQSRGLFGAIAGFIEGGWTGMIDGWYGYHHQNEQGSGYAADRKS |
| | TQNAIDGITNKVNSVIEKMNTQFTSVGKEFNHLEKRIENLNRKVDDGFLDVW |
| | TYNAELLVLLENERTLDYHDSNVKNLYEKVRSQLKNNAKEIGNGCFEFYHKC |
| | DDSCMESVKNGTYDYPKYSEESKLNREEIDGVKLES |
| 2 | ADTICIGYHANNSTDTVDTIFEKNVAVTHSVNLLEDRHNGKLCKLKGIAPLQL |
| | GKCNIIGWLLGNPECDSLLPARSWSYIVETPNSENGACYPGDFIDYEELREQLS |
| | SVSSLERFEIFPKESSWPNHTFNGVTASCSHRGKSSFYRNLLWLTKKGDSYPK |
| | LTNSYVNNKGKEVLVLWGVHHPSSSDEQQSLYSNGNAYVSVASSNYNRRFT |
| | PEIAARPKVKDQHGRMNYYWTLLEPGDTIIFEATGNLIAPWYAFALSRGFESG |
| | IITSNASMHECNTKCQTPQGSINSNLPFQNIHPVTIGECPKYVRSTKLRMVTGL |
| | RNIPSIQSRGLFGAIAGFIEGGWTGMIDGWYGYHHQNEQGSGYAADQKSTQN |
| | AINGITNKVNSIIEKMNTQFTAVGKEFNNLEKRMENLNKKVDDGFLDIWTYN |
| | AELLVLLENGRTLDFHDLNVKNLYEKVKSQLKNNAKEIGNGCFEFYHKCDNE |
| | CMESVRNGTYDYPKYSEESKLNREKIDGVKLES |
| 3 | ADTICIGYHANNSTDTVDTVLEKNVTVTHSVNLLEDSHNGKLCRLKGIAPLQL |
| | GKCNIAGWLLGNPECDPLLPVRSWSYIVETPNSENGICYPGDFIDYEELREQLS |
| | SVSSFERFEIFPKESSWPNHNTNGVTAACSHEGKSSFYRNLLWLTEKEGSYPK |
| | LKNSYVNKKGKEVLVLWGIHHPPNSKEQQNLYQNENAYVSVVTSNYNRRFT |
| | PEIAERPKVRDQAGRMNYYWTLLKPGDTIIFEANGNLIAPMYAFALSRGFGSG |
| | IITSNASMHECNTKCQTPLGAINSSLPYQNIHPVTIGECPKYVRSAKLRMVTGL |
| | RNIPSIQSRGLFGAIAGFIEGGWTGMIDGWYGYHHQNEQGSGYAADQKSTQN |
| | AINGITNKVNTVIEKMNIQFTAVGKEFNKLEKRMENLNKKVDDGFLDIWTYN |
| | AELLVLLENERTLDFHDSNVKNLYEKVKSQLKNNAKEIGNGCFEFYHKCDNE |
| | CMESVRNGTYDYPKYSEESKLNREKVDGVKLES |
| 4 | ADTLCIGYHANNSTDTVDTVLEKNVTVTHSVNLLEDSHNGKLCRLGGIAPLQ |
| | LGKCNIAGWLLGNPECDLLLTVSSWSYIVETSNSDNGTCYPGDFIDYEELREQ |
| | LSSVSSFERFEIFPKTSSWPNHETTNGVTAACPYAGANSFYRNLLWLVKKGDS |
| | YPKLSKSYVNNKGKEVLVLWGVHHPPTSTEQQSLYQNADAYVSVGSSKYNR |
| | RFTPEIAARPKVRGQAGRMNYYWTLLEPGDTITFEATGNLVAPRYAFALNKG |
| | SGSGVITSDAPVHDCDTKCQTPHGAINSSLPFQNIHPVTIGECPKYVKSTKLRM |
| | ATGLRNIPSIQSRGLFGAIAGFIEGGWTGMIDGWYGYHQQNGQGSGYAADQK |
| | STQNAIDGITNKVNSVIEKMNTQFTAVGKEFNNLERRIENLNKKVDDGFLDV |
| | WTYNAELLVLLENERTLDFHDSNVKNLYEKVRSQLRNNAKEIGNGCFEFYHK |
| | CDNACMESVRNGTYDYPKYSEESKLNREEIDGVKLES |
| 5 | ADTICIGYQANNSTDTVDTLLEKNVTVTHSVNLLEDSHNGKLCKLKGIAPLQL |
| | GKCNIAGWLLGNPECDSLLPARSWSYIVETPNSETGACYPGDFIDYEELREQL |
| | SSVSSLERFEIFPKESSWPNHNTTGVTKSCSHRGESSFYRNLLWLTKKGNSYPE |
| | LNNSYVNNKGKEVLVLWGVHHPSNSNNQQTLYHNANAYVSVVSSNYNRRF |
| | TPEIAARPKVRDQTGRMNYYWTLLEPGDTIIFEATGNLIAPWYAFALSRGFGS |
| | GIITSNASMHECNTKCQTPQGAINSSLPFQNIHPVTIGECPKYVRSTKLRMVTG |
| | LRNIPSIQSRGLFGAIAGFIEGGWTGMIDGWYGYHHQNEQGSGYAADQKSTQ |
| | NAINRITNKVNSVIEKMNTQFTAVGKEFNNLEKRMENLNKEVDDGFLDIWTY |
| | NAELLVLLENEMTLDFHDSNVKNLYEKVKSQLKNNAKEIGNGCFEFYHKCD |
| | NECMESVRNGTYDYPKYSEDSKLNREKIDGVKLEP |
| 6 | ADTICIGYHANNSTDTVDTVLEKNVTVTHSVNLLEDSHNGKLCRLKGIAPLQL |
| | RKCNIAGWILGNPECESLLSERSWSYIVETPNSENGTCYPGDFTNYEELREQLS |
| | SVSSFERFEIFPKESSWPKHNTTRGVTAACSHAGKSSFYRNLLWLTEKDGSYP |
| | NLNNSYVNKKGKEVLVLWGVHHPSNIKDQQTLYQKENAYVSVVSSNYNRRF |
| | TPEIAERPKVRGQAGRMNYYWTLLKPGDTIMFEANGNLIAPWYAFALSRGFG |
| | SGIITSNASMHECDTKCQTPQGAINSSLPFQNIHPVTIGECPKYVRSTKLRMVT |
| | GLRNIPSIQSRGLFGAIAGFIEGGWTGMIDGWYGYHHQNEQGSGYAADQKST |
| | QNAINGITNKVNSVIEKMNTQFTAVGKEFNNLEKRMENLNKKVDDGFLDIWT |
| | YNAELLILLENERTLDFHDSNVKNLYEKVKSQLRNNAKEIGNGCFEFYHKCN |
| | NECMESVKNGTYDYPKYSEESKLNREKIDGVKLES |
| 7 | ADTICIGYHANNSTDTVDTVLEKNVTVTHSVNLLEDSHNGKLCRLKGIAPLQL |
| | GKCNIAGWILGNPECDSLLPASSWSYIVETPNSKNGICYPGDFIDYEELREQLS |
| | SVSSFERFEIFPKESSWPKHSTTKGVTAACSHAGKSSFYRNLLWLTKKEDSYP |
| | KLSNSYVNKKGKEVLVLWGVHHPSSSKEQQTLYQNENAYVSVVSSNYNRRFI |
| | PEIAERPEVKDQAGRINYYWTLLEPGDTIIFEANGNLVAPWYAFALSRGFGSGI |
| | ITSNASMHECNTKCQTPQGAINSSLPFQNIHPVTIGECPKYVKSAKLRMVTGL |
| | RNIPSIQSRGLFGAIAGFIEGGWTGMIDGWYGYHHQNEQGSGYAADQKSTQN |
| | AINGITNKVNSVIEKMNTQFTAVGKEFNNLEKRMENLNKKVDDGFLDIWTYN |
| | AELLVLLENERTLDFHDSNVKNLYEKVKIQLKNNAKEIGNGCFEFYHKCDNE |
| | CMESVRNGTYDYPKYSKESKLNREKIDGVKLES |
| 8 | ADTICIGYHANNSTDTVDTVLEKNVTVTHSVNLLEDSHNGKLCRLKGKAPLQ |
| | LGNCNIAGWVLGNPECESLLSNRSWSYIAETPNSENGTCYPGDFADYEELREQ |
| | LSSVSSFERFEIFPKESSWPNHTTRGVTAACPHARKSSFYKNLVWLTEANGSY |
| | PNLSRSYVNNQEKEVLVLWGVHHPSNIEEQRALYRKDNAYVSVVSSNYNRRF |
| | TPEIAKRPKVRDQSGRMNYYWTLLEPGDTIIFEATGNLIAPWYAFALSRGPGS |
| | GIITSNAPLDECDTKCQTPQGAINSSLPFQNIHPVTIGECPKYVRSTKLRMVTGL |
| | RNIPSIQSRGLFGAIAGFIEGGWTGMMDGWYGYHHQNEQGSGYAADQKSTQ |
| | NAINGITNKVNSVIEKMNTQFTAVGKEFNKLEKRMENLNKKVDDGFMDIWT |
| | YNAELLVLLENERTLDFHDSNVKNLYEKVKNQLRNNAKELGNGCFEFYHKC |
| | DNECMESVKNGTYDYPKYSEESKLNREKIDGVKLES |
| 9 | ADTLCIGYHANNSTDTVDTVLEKNVTVTHSVNLLEDRHNGKLCKLGGIAPLH |
| | LGKCNIAGWLLGNPECELLLTVSSWSYIVETSNSDNGTCYPGDFINYEELREQ |
| | LSSVSSFERFEIFPKTSSWPNHETNRGVTAACPYAGANSFYRNLIWLVEKGNS |
| | YPKLSKSYVNNKGKEVLVLWGIHHPPTSTDQQSLYQNADAYVFVGSSKYNR |
| | KFKPEIAARPKVRGQAGRMNYYWTLIEPGDTITFEATGNLVVPRYAFAMNRG |
| | SGSGIIISDAPVHDCNTKCQTPKGAINTSLPFQNIHPVTIGECPKYVKSTKLRMA |
| | TGLRNIPSIQSRGLFGAIAGFIEGGWTGMIDGWYGYHHQNEQGSGYAADQRS |
| | TQNAIDGITNKVNSVIEKMNTQFTAVGKEFNHLEKRIENLNKKVDDGFLDIWT |
| | YNAELLVLLENERTLDFHDSNVKNLYEKVRSQLRNNAKEIGNGCFEFYHKCD |
| | DTCMESVKNGTYDYPKYSEESKLNREEIDGVKLES |
| 10 | ADTICIGYHANNSTDTVDTVLEKNVTVTHSVNLLEDSHNGKLCRLKGIAPLQL |
| | GKCNIAGWILGNPECESLFSKKSWSYIAETPNSENGTCYPGYFADYEELREQL |
| | SSVSSFERFEIFPKESSWPKHNVTRGVTASCSHKGKSSFYRNLLWLTEKNGSY |
| | PNLSKSYVNNKEKEVLVLWGVHHPSNIEDQKTIYRKENAYVSVVSSNYNRRF |
| | TPEIAERPKVRGQAGRINYYWTLLEPGDTIIFEANGNLIAPWHAFALNRGFGSG |
| | ITTSNASMDECDTKCQTPQGAINSSLPFQNIHPVTIGECPKYVRSTKLRMVTGL |
| | RNIPSIQSRGLFGAIAGFIEGGWTGMIDGWYGYHHQNEQGSGYAADQKSTQN |
| | AINGITNKVNSVIEKMNTQFTAVGKEFNKLEKRMENLNKKVDDGFLDIWTYN |
| | AELLVLLENERTLDFHDSNVKNLYEKVKSQLKNNAKEIGNGCFEFYHKCNNE |
| | CMESVKNGTYDYPKYSEESKLNREKIDGVKLES |
| 11 | ADTICIGYHANNSTDTVDTVLEKNVTVTHSVNLLEDSHNGKLCRLKGIAPLQL |
| | GNCSIAGWILGNPECESLFSKKSWSYIAETPNSENGTCYPGYFADYEELREQLS |
| | SVSSFERFEIFPKESSWPNHTVTKGVTASCSHKGKSSFYRNLLWLTEKNGSYP |
| | TLSKSYVNNKEKEVLVLWGVHHPSNIGDQRAIYHTENAYVSVVSSHYNRRFT |
| | PEIAKRPKVRGQEGRINYYWTLLEPGDTIIFEANGNLIAPWYAFALSRGFGSGII |
| | TSNASMDECDAKCQTPQGAINSSLPFQNVHPVTIGECPKYVRSTKLRMVTGL |
| | RNIPSIQSRGLFGAIAGFIEGGWTGMIDGWYGYHHQNEQGSGYAADQKSTQN |
| | AINGITNKVNSVIEKMNTQFTAVGKEFNKLERRMENLNKKVDDGFLDIWTYN |
| | AELLVLLENERTLDFHDSNVKNLYEKVKSQLKNNAKEIGNGCFEFYHKCNNE |
| | CMESVKNGTYDYPKYSEESKLNREKIDGVKLES |
| 12 | ADTICIGYHANNSTDTVDTVLEKNVTVTHSVNLLEDSHNGKLCRLKGIAPLQL |
| | GNCSVAGWILGNPKCESLFSKESWSYIAETPNPENGTCYPGYFADYEELREQL |
| | SSVSSFERFEIFPKESSWPNHTVTKGVTTSCSHNGKSSFYRNLLWLTEKNGLYP |
| | NLSKSYVNNKEKEVLVLWGVHHPSNIRDQRAIYHTENAYVSVVSSHYSRRFT |
| | PEIAKRPKVRGQEGRINYYWTLLEPGDTIIFEANGNLIAPWYAFALSRGFGSGII |
| | TSNASMDECDAKCQTPQGAINSSLPFQNVHPVTIGECPKYVRSTKLRMVTGL |
| | RNIPSIQSRGLFGAIAGFIEGGWTGMIDGWYGYHHQNEQGSGYAADQKSTQN |
| | AINGITNKVNSVIEKMNTQFTAVGKEFNKLERRMENLNKKVDDGFLDIWTYN |
| | AELLVLLENGRTLDFHDSNVKNLYEKVKSQLKNNAKEIGNGCFEFYHKCNNE |
| | CMESVKNGTYDYPKYSEESKLNRGKIDGVKLES |
| 13 | ADTICVGYHANNSTDTVDTILEKNVTVTHSVNLLENNHNGKLCSLNGIAPLQL |
| | GDCNVAGWILGNPECDSLLTANSWSYIIETSNSENGTCYPGEFADYEELRELL |
| | SSVSSFERFEIFPKATSWPNHETTKGVTAACSHSGARSFYRNLLWIVKKGNSY |
| | PKLSKSYTNNRRKEVLVIWGVHHPPTNNDQQSLYQNADAYVSVGSSKYYRR |
| | FTPEIADRPKVRGQAGRMNYYWTMLDQGDTITFEATGNLIAPWYAFALNKG |
| | LSSGIIMSDAPVHNCTTRCQTPYGALNSNLPFQNVHPITIGKCPKYVKSTQLRM |
| | ATGLRNVPSIQSRGLFGAIAGFIEGGWTGMVDGWYGYHHQNEQGSGYAADQ |
| | KSTQNAIDGISNKVNSIIEKMNIQFTSVGKEFNDLEKRVENLNKKVDDGFLDV |
| | WTYNAELLVLLENERTLDFHDFNVRNLYEKVKSQLRNNAKEVGNGCFEFYH |
| | KCDDECMESVRNGTYNYPKYSEESKLNREKIDGVKLES |
| 14 | ADTICIGYHANNSTDTVDTVLEKNVTVTHSVNLLEDSHNGKLCLLKGIAPLQL |
| | GNCSVAGWILGNPECESLISKESWSYIVETPNPENGTCYPGYFADYEELREQLS |
| | SVSSFERFEIFPKESSWPNHTVTGVTASCSHNGKSSFYRNLLWLTEKNGLYPN |
| | LSNSYVNNKEKEVLVLWGVHHPSNIRDQRAIYHTENAYVSVVSSHYSRRFTP |
| | EIAKRPKVRGQEGRINYYWTLLEPGDTIIFEANGNLIAPWYAFALSRGFGSGIIT |
| | SNAPMNECDAKCQTPQGAINSSLPFQNVHPVTIGECPKYVRSTKLRMVTGLR |
| | NIPSIQSRGLFGAIAGFIEGGWTGMMDGWYGYHHQNEQGSGYAADQKSTQN |
| | AINGITNKVNSVIEKMNTQFTAVGKEFNKLERRMENLNKKVDDGFLDIWTYN |
| | AELLVLLENERTLDFHDSNVKNLYEKVKSQLKNNAKEIGNGCFEFYHKCNNE |
| | CMESVKNGTYDYPKYSEESKLNREKIDGVKLES |
| 15 | ADTICIGYHANNSTDTVDTVLEKNVTVTHSVNLLENNHNGKLCNLNGIAPLQ |
| | LGKCNVAGWLLGNPECGLLLNANAWSYIIETSDSKNGTCYPGDFIDYEELRE |
| | QLGSVSSFEKFEIFPKASSWPDHETTKGTTAACPYSGVESFYRNLLWIIKKGNS |
| | YPKISKSYTNNRGKEVLVLWGVHHPPTTSDQQTLYQNIDAYVSVGSSKYNRR |
| | FTPEIATRPKVRGLAGRMNYYWTLLDQGDTIMFEATGNLIAPWYAFALNKGS |
| | DSGIITSDTPVHDCDTKCQTPYGALNSSLPFQNVHPITIGECPKYVKSTKLRMA |
| | TGLRNVPSIQSKGLFGAIAGFIEGGWTGMIDGWYGYHHQNEQGSGYSADQKS |
| | TQNAIDGITNKVNSVIEKMNTQFTAVGKEFNNLERRIENLNKKVDDGFLDVW |
| | TYNAELLVLLENERTLDFHDSNVRDLYERVKSQLRNNAKEIGNGCFEFYHKC |
| | DDECMENVKNGTYDYPKYSEEAKLNREKIDGVKIES |
| 16 | ADTICIGYHANNSTDTVDTIFEKNVAVTHSVNLLEDSHNGKLCLLKGIAPLQL |
| | GNCSVAGWILGNPECELLISKESWSYIVETPNPENGTCYPGYFADYEELREQLS |
| | SVSSFERFEIFPKESSWPNHTVTGVSASCSHNGKSSFYRNLLWLTGKNGLYPN |
| | LSKSYANNKEKEVLVLWGVHHPPNIGDQQGLYSNGNAYVSVASSNYNRRFT |
| | PEIAARPKVKDQHGRMNYYWTLLEPGDTIIFEATGNLIAPWYAFALSRGFESG |
| | IITSNASMHECNTKCQTPQGSINSNLPFQNIHPVTIGECPKYVRSAKLRMVTGL |
| | RNIPSIQSRGLFGAIAGFIEGGWTGMVDGWYGYHHQNEQGSGYAADQKSTQ |
| | NAINGITNKVNSVIEKMNTQFTAVGKEFNRLERRMENLNKKVDDGFLDIWTY |
| | NAELLVLLENERTLDFHDSNVKNLYEKVKSQLKNNAKEIGNGCFEFYHKCNN |
| | ECMESVKNGTYDYPKYSEESKLNREKIDGVKLES |
| 17 | ADTLCIGYHANNSTDTVDTVLEKNVTVTHSVNLLENKHNGKLCKLRGVAPL |
| | HLGKCNIAGWLLGNPECESLFEASSWSYIVETPNSDNGTCYPGDFINYEELRE |
| | HLSSVSSFERFEIFPKANSWPNHDTDSGVTASCPYAGAKSFYRNLIWLVKKGS |
| | SYPKLSKSYINDKKKEVLVIWGIHHPPNSTDQQTLYQNADAYVFVGSSKYSK |
| | RFKPEIAARPKVRDQAGRMNYYWTLIEPGDTITFEATGNLVVPRYAFAMTRG |
| | SGSGIIISDTPVHDCNTTCQTPKGAINTSLPFQNIHPVTIGECPKYVKSTKLKMA |
| | TGLRNIPSIQSRGLFGAIAGFIEGGWTGMIDGWYGYHHQNEQGSGYAADQKS |
| | TQNAIDGITNKVNSVIEKMNTQFTAVGKEFNQLEKRIESLNNKVDDGFLDIWT |
| | YNAELLVLLENERTLDYHDSNVKNLYEKVRSQLKNNAKEIGNGCFEFYHKCD |
| | DTCMESVKNGTYDYPKYSEEAKLNREEIDGVKLES |
| 18 | ADTLCIGYHANNSTDTIDTVLEKNVTVTHSVNLLENKHNGKLCKLGGMTPLH |
| | LGKCNIAGWLLGNPECELLSTVSSWSYIVETPYSDNGTCYPGDFTNYEELREQ |
| | LSSVSSFERFEIFPKASSWPNHETNRGVTSACPYAGENDFYRNLLWLVKKGNS |
| | YPKLSKSYVNNKGKEVLILWGIHHPPTSADQQSLYQNADAYVFVGTSTYNRR |
| | FTPEVAARPKVRGQAGRMDYYWTLIGPGDTITFEATGNLVVPRYAFAMNRGS |
| | GSGIIISDIPFHNCTTKCQTPKGAINTSLPFQNVHPVTIGECPKYVKSTKLRMVT |
| | GLRNIPSIQSRGLFGAIAGFIEGGWTGMIDGWYGYHHQNEQGSGYAADQKST |
| | QNAIDKITNKVNSVIEKMNTQFTAVGKEFNHLERRIENLNRKVDDGFLDVWT |
| | YNAELLILLENERTLDLHDSNVKNLYEKVKSQLRNNAKEIGNGCFEFYHKCD |
| | DACMESVRNGTYDYPKYSEESRLNREEIDGVKLES |
| 19 | ADTLCIGYHANNSTDTVDTILEKNVTVTHSVNLLEDRHNGKLCKLRGVAPLH |
| | LGKCNIAGWLLGNPECESLFTARSWSYIVETSNSDNGTCYPGDFINYEELREQ |
| | LSSVSSFERFEIFPNTSSWPNHDTNRGVTAACPHAGTKSFYRNLIWLVKKGDS |
| | YPKISKSYINNKEKEVLVLWGIHHPSTSADQQSLYQNADAYVFVGSSKYSKKF |
| | KPEIATRPKVRDQEGRMDYYWTIVEPGDKITFEATGNLVVPRYAFELKRNSGS |
| | GIIISDTSVHDCNTTCQTPKGAINTSLPFQNIHPVTIGECPKYVKSTKLRMATGL |
| | RNIPSIQSRGLFGAIAGFIEGGWTGMIDGWYGYHHQNEQGSGYAADLKSTQN |
| | AIDGITNKVNSIIEKMNTQFTAVGKEFSHLEKRIENLNKKVDDGFLDIWTYNA |
| | ELLVLLENERTLDYHDSNVKNLYEKVKSQLKNNAKEIGNGCFEFYHKCDDM |
| | CMESVKNGTYDYPKYSEEAKLNREEIDGVKLES |
| 20 | ADTICVGYHANNSTDTVDTILEKNVTVTHSVNLLESNHNGKLCSLNGKAPLQ |
| | LGNCNVAGWILGNPECDLLLTANSWSYIIETSNSKNGACYPGEFADYEELREL |
| | LSTVSSFERFEIFPKATSWPHHETTKGTTVACPHSGVNSFYRNLLWIVKKGNS |
| | YPKLSKSYTNSKGKEVLVIWGVHHPPTDSDQQTLYQNNHTYVSVGTSKYYR |
| | RFTPEIVARPKIREQAGRMNYYWTLLDQGDTITLEATGNLIVPWHAFALNKGS |
| | NSGIMISDADFHNCTTKCQTPHGALKSNLPFQNVHPITIGECPKYVKSTQLRM |
| | ATGLRNVPSIQSRGLFGAIAGFIEGGWTGMIDGWYGYHHQNEQGSGYAADQ |
| | KSTQIAIDGISNKVNSVIEKMNIQFASVGKEFNDLEKRIENLNKKVDDGFVDV |
| | WTYNAELLILLENERTLDFHDFNVKNLYEKVKSQLRNNAKEIGNGCFEFYHK |
| | CDNECMESVKNGTYNYPKYSEESKLNREEIDGVKLES |
| 21 | ADTLCIGYHANNSTDTVDTILEKNVTVTHSVNLLEDKHNGRLCKLGGIAPLNL |
| | GRCNIAGWLLGNPECESLFTVSSWSYIVETSNSYNGTCYPGDFINYEELREQLS |
| | SVSSFERFEIFPMASSWPNHETTKGVTAACSHAGENSFYRNLIWLVKKENTYP |
| | KISKSYINNKGKEVLVLWGIHHPPTNNDQQSLYQNADTYVFVGTSKYNKKFK |
| | PEIATRPKVRDQAGRMNYYWTLVEPGDTITFEATGNLVAPRYAFAMNKGSGS |
| | GIIVSDIPAHDCNTNCQTPKGAINTSLPFQNVHPVTIGECPKYVKSTRLRMATG |
| | LRNIPSIQSRGLFGAIAGFIEGGWTGMIDGWYGYHHQNGQGSGYAADQKSTQ |
| | NAIDGITNKVNSVIEKMNTQFTAVGKEFNHLEKRIENLNKKVDDGFLDVWTY |
| | NAELLILLENERTLDFHDSNVKNLYEKARRQLKNNAKEIGNGCFEFYHKCDN |
| | ACMESVKNGTYDYPKYSEESRLNREEIDGVKLDS |
| 22 | ADTLCIGYHANNSTDTVDTVLEKNVTVTHSVNLLENKHDGKLCKLRGIAPLH |
| | LGKCNIAGWILGNPECESLFTTSSWSYIVETPNSDNGTCYPGDFINYEELREHL |
| | SSVSSFERFEIFPKANSWPYHDTNKGVTAACPYAGANSFYRNLIWLVKKGNS |
| | YPKLSKSYINNKKKEVLVIVVGIHHPPTSTDQQTLYQNADAYVFVGSSKYSKRF |
| | KPEIAARPKVRDQAGRMDYYWTLIEPGDTITFEATGNLVVPRYAFTMKRGSG |
| | SGIIVSDAPVHDCNTTCQTPKGAINTSLPFQNIHPVTIGECPKYVKSTKLRMAT |
| | GLRNIPSIQSRGLFGAIAGFIEGGWTGMIDGWYGYHHQNEQGSGYAADQKST |
| | QNAIDGITNKVNSIIEKMNTQFTAVGKEFSQLEKRIESLNNKVDDGFLDIWTY |
| | NAELLVLLENERTLDYHDSNVKNLYEKVRSQLKNNAKEIGNGCFEFYHKCDD |
| | TCMESVKNGTYDYPKYSEEAKLNRQEIDGVKLES |
| 23 | ADTLCIGYHANNSTDTVDTILEKNVTVTHSVNLLEDRHNGKLCNLRGEAPLH |
| | LGKCNIAGWLLGNPECELLFAVNSWSYIVETSNSDNGTCYPGDFTSYEELREQ |
| | LSSVSSFERFEIFPKASSWPNHETNRGVTAACPYAGTNSFYRNLIWLVKKGNS |
| | YPKLSKSYVNNKKKEVLVLWGIHHPPTNADQQSLYQNADAYVFVGSSKYNK |
| | KFKPEIAKRPKVRGQAGRMNYYWTLVEPGDTITFEATGNLVAPRYAFAMNR |
| | DPGSGIITSDAPIHDCNATCQTPKGAINTSLPFQNIHPITIGECPKYVKSTRLRM |
| | ATGLRNIPSIQSRGLFGAIAGFIEGGWTGMIDGWYGYHHQNGQGSGYAADQK |
| | STQNAIDRITNKVNSVIEKMNIQFTAVGKEFNHLERRIENLNKKVDDGFLDVW |
| | TYNAELLVLLENERTLDFHDSNVKTLYEKVKTQLRNNAKEIGNGCFEFYHKC |
| | DDTCMESIKNGTYDYPKYSKESKLNREEIDGVQLES |
| 24 | ADTLCVGYHANNSTDTVDTVLEKNVTVTHSVNLLEDNHNGKLCKLRGIAPL |
| | HLGKCNIAGWLLGNPECELLFTAKSWSYIVETSNPDNGICYPGDFSNYEELRE |
| | QLSSVSSFERFEIFPNASSWPNHETNRGITAACPYAGANSFYRNLIWLVKKGNS |
| | YPKINKSYINNKGKEVLVLWGIHHPSTSNDQQSLYQNADAYVFVGSSKYNRR |
| | FKPEIATRPKVRDQAGRMNYYWTLVEPGDTITFEATGNLIAPRYAFAMTRGS |
| | GSGIMISDTPVYDCNTICQTPKGAINTSLPFQNIHPVTIGKCPKYVKSTKLRLAT |
| | GLRNIPSIQYRGLFGAIAGFIEGGWTGMVDGWYGYHHQNEQGSGFAADRKST |
| | QNAIDGITNKVNSVIEKVNTQFTAVGKEFNHLEKRIENLNKKVDDGFLDVWT |
| | YNAELLVLLENERTLDFHDSNVKNLYEKVRSQLRNNAKEIGNGCFEFYHKCD |
| | NTCMESVKNGTYDYPRYSEESKLNREEIDGVKLES |
| 25 | ADTICVGYHANNSTDTVDTILEKNVTVTHSVNILETTHNGKLCSLSGIAPLQLG |
| | NCNIAGWILGNPECDLLLTVNSWSYIIETSNSVNGTCYPGEFADYEELREQLSS |
| | VASFERFEIFPKTTSWPNHETTRGTTAACSHSGTRSFYRNLLWIVKKGNSYPKI |
| | SKSYTNKKGKEVLVIWGVHHPPTNNDQQSLYQNAYTYVSVESSKYYRRFTPE |
| | IASRPKVRGQEGRMNYYWTLLDQGDTITFEATGNLIAPWYAFALNKGSDSGII |
| | ISDAQVHNCTTKCQTPHGALNSTLPFQNVHPITIGECPKYVKSTHLRMATGLR |
| | NVPSIQSRGLFGAIAGFIEGGWTGMIDGWYGYHHQNEQGSGYAADKKSTQIA |
| | IDGISNKVNSVIEKMNIQFTSVGKEFNNLEKRIENLNKKVDDGFLDIWTYNAE |
| | LFVLLENERTLDFHDFNVKNLYERVKSQLRNNAKEVGNGCFEFYHKCDNEC |
| | MESVKNGTYNYPKYSEESKLNREEIDGVKLES |
| 26 | ADTLCIGYHANNSTDTVDTVLEKNITVTHSVNLLEDKHNGKLCKLRGVAPLH |
| | LGKCNIAGWLLGNPECESLFNVSSWSYIVETSNSDNGTCYPGDFTNYEELKEQ |
| | LSSVSSFERFEIFPKEGSWPNHETNRGVTAACPHAGANSFYKNLIWLVKRGNS |
| | YPKLNKSYVNNKKKEVLVLWGIHHPPTSTDQQSLYQNADAYVFVGSSKYSK |
| | KFKPEIATRPKVRDQAGRMNYYWTLVEPEDTITFEATGNLVVPRYAFAMNRG |
| | SGSGIITSDTPVHDCNTTCQTPKGAINTSLPFQNVHPITIGECPKYVKSTKLRMA |
| | TGLRNIPSIQSRGLFGAIAGFIEGGWTGMIDGWYGYHHQNGQGSGYAADQKS |
| | TQNAIDGVTNKVNSIIEKMNTQFAAVGKEFNHLEKRIENLNKKVDDGFLDVW |
| | TYNAELLVLLENERTLDFHDSNVRNLYDKVRSQLRNNAKEIGNGCFEFYHKC |
| | DDTCMESVKNGTYDYPKYSEESKLNREEIDGVRLDS |
| 27 | ADTICIGYHANNSTDTVDTVLEKNVTVTHSVNLLEDSHNGKLCLLKGIAPLQL |
| | GNCSVAGWILGNPECELLISRESWSYIVEKPNPENGTCYPGHFADYEELREQL |
| | SSVSSFERFEIFPKESSWPNHTTTGVSASCSHNGESSFYKNLLWLTGKNGLYPN |
| | LSKSYANNKEKEVLVLWGVHHPPNIGDQRALYHKENAYVSVVSSHYSRKFTP |
| | EIAKRPKVRDQEGRINYYWTLLEPGDTIIFEANGNLIAPRYAFALSRGFGSGIIN |
| | SNAPMDECDAKCQTPQGAINSSLPFQNVHPVTIGECPKYVRSAKLRMVTGLR |
| | NIPSIQSRGLFGAIAGFIEGGWTGMVDGWYGYHHQNEQGSGYAADQKSTQN |
| | AINGITNKVNSVIEKMNTQFTAVGKEFNKLERRMENLNKKVDDGFIDIWTYN |
| | AELLVLLENERTLDFHDSNVKNLYEKVKSQLKNNAKEIGNGCFEFYHKCNDE |
| | CMESVKNGTYDYPKYSEESKLNREKIDGVKLES |
| 28 | ADTLCIGYHANNSTETVDTVLEKNVTVTHSINLLEDKHNGKLCRLRGVTPLH |
| | LGKCNIAGWLLGNPECESLSTASSWSYIVETSNSDNGTCYPGDFINYEELREQL |
| | SSVSSFERFEIFPNASSWPDHETNKGVTAACPHAGAKSFYRNLLWLVKKKNS |
| | YPKLSKSYINNKGKEVLVLWGIHHPSNIQDQETLYQNADTYVFVGSSKYSKK |
| | FKPEIATRPKVRDQTGRMNYYWTLVEPGDTITFEATGNLVIPKYAFAMKRGS |
| | GSGIIISDATVHDCNTTCQTPKGAINTSLPFQNIHPVTIGECPKYVKSTKLRMAT |
| | GLRNVPSIQSRGLFGAIAGFIEGGWTGMIDGWYGYHHQNEQGSGYAADRKST |
| | QNAIDGITNKVNSVIEKMNTQFSAVGKEFNHLEKRIENLNKKVDDGFLDVWT |
| | YNAELLVLLENERTLDYHDSNVKNLYEKVRSQLKNNAKEIGNGCFEFYHKCD |
| | DACMESVKNGTYDYPKYSEEAKLNREKIDGVKLES |
| 29 | ADTICIGYHANNSTDTVDTVLEKNVTVTHSVNLLEDTHNGKLCKLGGMAPLH |
| | LGRCNIAGWLLGNPECELISTVSSWSYIVETSNSDNGTCYPGDFTNYEELREQL |
| | SSVSSFEKFEMFPKISSWPNHETNRGVTAACPYAGANSFYRNLIWLVKKGNSY |
| | PKLSKSYVNNKGKEVLVLWGIHHPPTSADQQSLYQNVDTYVFVGSSTYNRKF |
| | KPEIAVRPKVRDQTGRMNYYWTLIKPGDTITFEATGNLVAPRYAFAMSRGSG |
| | SGIITSDMPVHNCTTKCQTPKGALNTSLPFQNVHPVTIGECPKYVKSTKLRMA |
| | TGLRNIPSIQSRGLFGAIAGFIEGGWTGMIDGWYGYHHQNEQGSGYAADQKS |
| | TQNAIDGITNKVNSVIEKMNTQFTAVGKEFNHLERRMENLNKKVDDGFLDV |
| | WTYNAELLILLENERTLDLHDSNVKNLYEKVRAQLRNNAKEIGNGCFEFYHK |
| | CDDACMESVKNGTYDYPKYSEESRLNREEIDGVKLES |
| 30 | ADTICIGYHANNSTDTVDTVLEKNVTVTHSVNLLENSHNGKLCLLKGIAPLQL |
| | GNCSVAGWILGNPECELLISKESWSYIVEKPNPENGTCYPGHFADYEELREQL |
| | SSVSSFERFEIFPKESSWPNHTVTGVSASCSHNGESSFYRNLLWLTGKNGLYPN |
| | LSKSYANNKEKEVLVLWGVHHPPNIGDQKALYHTENAYVSVVSSHYSRKFTP |
| | EIAKRPKVRDQEGRINYYWTLLEPGDTIIFEANGNLIAPRYAFALSRGFGSGIIN |
| | SNAPMDKCDAKCQTPQGAINSSLPFQNVHPVTIGECPKYVRSAKLRMVTGLR |
| | NIPSIQSRGLFGAIAGFIEGGWTGMVDGWYGYHHQNEQGSGYAADQKSTQN |
| | AINGITNKVNSVIEKMNTQFTAVGKEFNKLERRMENLNKKVDDGFIDIWTYN |
| | AELLVLLENERTLDFHDSNVKNLYEKVKSQLKNNAKEIGNGCFEFYHKCNDE |
| | CMESVKNGTYDYPKYSEESKLNREKIDGVKLES |
| 31 | ADTICVGYHANNSTDTIDTILEKNVTVTHSVNLLENSHNGKLCSLNGIAPLQL |
| | GSCNVAGWILGNPECDLLLTVNSWSYIVETSNSENGTCYPGEFADYEELREQL |
| | SSVSSFERFEIFPKTTSWPNHDTTKGTTAACSHSGTNSFYRNLLWIVKKGNSYP |
| | KLNSSYTNNKGKEVLIIWGVHHPPTNNDQQSLYQNADTYVSVGSSKYYQRFT |
| | PEIAARPKVRGQAGRMNYYWTLLDQGDTITFEATGNLIAPWYAFALNKNSGS |
| | GIMISDAQVHNCTTKCQTPHGAMNSNLPFQNVHPVTIGECPKYVKSTQLRMA |
| | TGLRNVPSIQSRGLFGAIAGFIEGGWTGMIDGWYGYHHQNGQGSGYAADQK |
| | STQLAIDGISNKVNSVIEKMNIQFTSVGKEFNNLEKRIENLNKKVDDGFLDVW |
| | TYNAEILILLENERTLDFHDFNVKNLYEKVKSQLRNNAKEVGNGCFEFYHKC |
| | DNECMESVRNGTYNYSKYSEESKLNREEIDGVKLES |
| 32 | ADTLCVGYHANNSTDTVDTILEKNVTVTHSVNLLEDRHNGKLCKLGGIAPLH |
| | LGKCNIAGWLLGNPECDSLLTVRSWSYIVETSNSDNGTCYPGEFINYEELKEQ |
| | LSSVSSFERFEIFPKASSWPNHETNKGVTAACPYAGSNSFYRNLIWLVKKGNS |
| | YPKLNKSYINNKGKEVLVLWGIHHPPTNNDQQSLYQNEDAYVFIGSSKYNKK |
| | FKPEIATRPKVRGQAGRMDYYWLLMEPGETITFEATGNLVVPRYAFAMNRD |
| | ARSGIIISDVSVHDCNTTCQTPKGALNTSLPFQNIHPVTIGECPKYVKSTKLRM |
| | ATGLRNIPSIQSRGLFGAIAGFIEGGWTGMIDGWYGYHHQNEQGSGYAADQK |
| | STQNAIDGITNKINSVIEKMNTQFAAVGKEFNHLEKRLENLNKKVDDGFLDV |
| | WTYNAELLVLLENERTLDFHDSNVKNLYEKVRSQLRNNAKEIGNGCFEFYHR |
| | CDDACMESVKNGTYDYPVYSEESRLNREEIDGVKLDS |
| 33 | ADTLCIGYHANNSTDTVDTVLEKNVTVTHSVNLLEDKHNGKLCKLRGVAPL |
| | HLGKCNIAGWILGNPECESLSTASSWSYIVETPSSDNGTCYPGDFIDYEELREQ |
| | LSSVSSFERFEIFPKTSSWPNHDSNKGVTAACPHAGAKSFYKNLIWLVKKGNS |
| | YPKLSKSYINDKGKEVLVLWGIHHPSTSADQQSLYQNADAYVFVGSSRYSKK |
| | FKPEIAIRPKVRDREGRMNYYWTLVEPGDKITFEATGNLVVPRYAFAMERNA |
| | GSGIIISDTPVHDCNTTCQTPKGAINTSLPFQNIHPITIGKCPKYVKSTKLRLATG |
| | LRNIPSIQSRGLFGAIAGFIEGGWTGMVDGWYGYHHQNEQGSGYAADLKSTQ |
| | NAIDEITNKVNSVIEKMNTQFTAVGKEFNHLEKRIENLNKKVDDGFLDIWTYN |
| | AELLVLLENERTLDYHDSNVKNLYEKVRSQLKNNAKEIGNGCFEFYHKCDNT |
| | CMESVKNGTYDYPKYSEEAKLNREEIDGVKLES |
| 34 | ADTICIGYHANNSTDTVDTVLEKNVTVTHSVNLLEDNHNGKLCSLKGIVPLQL |
| | GNCSVAGWILGNPECELLISKKSWSYIVETPNPENGACYPGDFADYEELREQL |
| | SSVSSFERFEIFPKESSWPNHNVNGVSAACSHNGERSFYRNLLWLTGKNGLYP |
| | NLTNSYVNSKEKEVLILWGVHHPSNIRDQRTLYQTENAYVSVMSSHYSRRFT |
| | PEITKRPKVRDQEGRINYYWTLLEPGDTIIFEASGNLIAPWYGFELSRGFGSGII |
| | TSSAPTDECDAKCQTPQGAINSSLPFQNVHPVTIGECPKYVRSAKLRMVTGLR |
| | NIPSIQSRGLFGAIAGFIEGGWTGMVDGWYGYHHQNEQGSGYAADQESTQNA |
| | INGITNKVNSVIEKMNTQFTAVGKEFNKLERRMENLNKKVDDGFLDIWTYNA |
| | ELLVLLENERTLDFHDSNVRSLYEKVRVQLKNNAKEIGNGCFEFYHKCNNEC |
| | MESVRNGTYDYPKYSEESKLNREKIDGVKLDS |
| 35 | ADTLCIGYHANNSTDTVDTVLEKNVTVTHSVNLLENRHNGKLCKLRGVAPL |
| | HLGKCNIAGWLLGNPECESLSTASSWSYIVETSNSDNGTCYPGDFINYEELRE |
| | QLSSVSSFERFEIFPKTSSWPNHDTNRGVTAACPHDGTNSFYRNLIWLVKKGN |
| | SYPKINKSYINNKEKEILVLWAIHHPSTSADQQSLYQNADAYVFVGSSRYSRK |
| | FEPEVATRPKVRDQAGRMNYYWTLVEPGDKITFEATGNLVVPRYAFALKRNS |
| | GSGIIISDTSVHDCDTNCQTPNGAINTSLPFQNIHPVTIGECPKYVKSTKLRMAT |
| | GLRNIPSIQSRGLFGAIAGFIEGGWTGMIDGWYGYHHQNEQGSGYAADLKST |
| | QNAIDGITNKVNSVIEKMNTQFTAVGKEFSHLERRIENLNKKVDDGFLDIWTY |
| | NAELLVLLENERTLDYHDSNVKNLYEKVRSQLKNNAKEIGNGCFEFYHKCDD |
| | MCMESVKNGTYDYPKYSEEAKLNREEIDGVKLES |
| 36 | ADTLCVGYHANNSTDTVDTVLEKNVTVTHSVNLLEDRHNGKLCKLRGVPPL |
| | HLGKCNIAGWLLGNPECEPLLTTSSWSYIVETSISENGTCYPGDFIDYEELREQ |
| | LSSVSSFERFEIFPKTSSWPNHDSNSGVTAACPHAGAKSFYRNLIWLVKKGNS |
| | YPKLSKSYINNKGKEVLVLWGIHHPPTSADQQSLYQNVDTYVFVGSSRYSKK |
| | FKPEIATRPKVRDQAGRMNYYWTLVEPGDKITFEATGNLIVPRYAFAMRRNS |
| | GSGIIISDTPVHDCNATCQTPNGAINTSLPFQNIHPVTIGECPKYIKSTKLRMAT |
| | GLRNVPSIQSRGLFGAIAGFIEGGWTGMIDGWYGYHHRNEQGSGYAADLKST |
| | QNAIDGITNKVNSVIEKMNTQFTAVGKEFNHLEKRIENLNKKVDDGFLDIWT |
| | YNAELLVLLENERTLDYHDSNVKNLYEKVKSQLKNNAKEIGNGCFEFYHKC |
| | DNTCMESVKNGTYDYPKYSEEAKLNREEIDGVRLES |
| 37 | ADTICIGYHANNSTDTVDTVLEKNVTVTHSVNLLEDSHNGKLCLLKGIAPLQL |
| | GNCSVAGWILGNPECESLISKKSWSYIVETPNPENGACYPGEFADYEELREQL |
| | SSVSSFERFEIFPKESSWPNHTATGESASCSHNGKKSFYRNLIWLTVKNGLYPN |
| | LSKSYENDKEKEVLILWGVHHPPNIENQRTLYHTENAYVSVVSSHYSGRFTPE |
| | ITKRPKVRDQEGRINYYWTLLEPGDTIIFEANGNLIAPWYAFALSRGLGSGIITS |
| | NAPMDECDSKCQTPQGAINSSLPFQNVHPVTIGECPKYVRSAKLRMVTGLRNI |
| | PSIQSRGLFGAIAGFIEGGWTGMVDGWYGYHHQNEQGSGYAADQESTQNAIN |
| | GITNKVNSVIEKMNTQFTAVGKEFNKLERRMENLNKKVDDGFLDIWTYNAEL |
| | LVLLENERTLDFHDSNVKSLYEKVKSQLKNNAKEIGNGCFEFYHKCNNECME |
| | SVKNGTYDYPKYYEESKLNREKIDGVKLDS |
| 38 | ADTICIGYHANNSTDTVDTVLEKNVTVTHSINLLEDSHNGKLCKLKGIAPLQL |
| | GDCSIAGWILGNPNCESLFSKKSWSYIAEIPNPENGICYPGYFSDYEELREQLSS |
| | ISSFERFEIFPKESSWPKHSVNKGVTASCSHKGKSSFYRNLLWLTEKNGSYPNL |
| | SKSYVNSREKEVLVLWGVHHPSNIEDQRAIYRKENAYISVVSSLYNRRFTPEIA |
| | RRPKVRDQEGRINYYWTILEPRDTIIFEATGNLIAPWYAFSLSRGFKSGIIVSNS |
| | SIDNCDTKCQTPQGAINSSLPFQNVHPVTIGECPKYVRSTKLRMATGLRNIQSI |
| | QSRGLFGAIAGFIEGGWTGMIDGWYGYHHQNEQGSGYAADLKSTQNAIDGIT |
| | NKVNSVIDKMNTQFASVGKEFNKLEKRMENLNKKVDDGFLDIWTYNAELLV |
| | LLENERTLDFHDSNVKSLYNKVKGQLKSNAKEIGNGCFEFYHKCDNECMESV |
| | KNGTYDYKEYSEESKLNREKIDGVELKS |
| 39 | ADTICIGYHANNSTDTVDTVLEKNVTVTHSVNLLEDSHNGKLCRLNGISPLQL |
| | GTCSIAGWVLGNPKCESLFSRRSWSYIAEVPNPENGICYPGHFSDYEELREQLS |
| | SVSSFERFEIFPKESSWPGHNLTKGVTASCSHNGKSSFYRNLLWLTGEKGLYP |
| | KVNKSYVNNKKKEVLVLWGVHHPSNIEDQRAIYHEENAYVSVVSSHYSRRFT |
| | PEIARRPKIRNQEGRINYYWTLLEPDDKIIFEANGNLIAPRYAFALSRGFGSGIIV |
| | SNTSIDECNTKCQTPQGAINSSLPFQNVHPVTIGECPKYVRSTKLRMVTGLRNI |
| | PSIQSRGLFGAIAGFIEGGWTGMIDGWYGYHHRNEQGSGYAADQESTQNAIN |
| | GITNKVNSVIEKMNTQFTAVGKEFNKLEKRMENLNKKVDDGFLDIWTYNAE |
| | LLVLLENERTLDFHDSNVKNLYEKVKSQLKNNAKEIGNGCFEFYHKCDDDC |
| | MESVKNGTYDYPRYSEESSLNRGKIDGVKLES |
| 40 | ADTICIGYHANNSTDTVDTILEKNVTVTHSVNLLESSHNGKLCRMKGMAPLQ |
| | LGKCSIAGWILGNPECESSFSRKSWSYIAEAPNPENGICYPGYFSDYEELREQL |
| | SSVSSVERFEIFPKESSWPKHNVTRGKTVSCPHNGKSSFYKNLLWLTEKDGSY |
| | PNVSKPYVNNKEKEVLVIWGVHNPSNIEDQRAIYRKETAYVSVVSSHYNRRF |
| | TPEIEKRPKIKNQEGRINYYWTLLEPGETIIFEANGNFIAPWYAFALSRGFRSGII |
| | VSNASMDECDTECQTPQGAINNSLPFQNVHPVAIGECPKYIKSTRLRMVTGLR |
| | NIPSIQSRGLFGAIAGFIEGGWTGMIDGWYGYHHRNEQGSGFAADQESTQNAI |
| | NGITNKVNSIIGKMNTQFTAAGKEFNRLEKRMENLNKKVDDGLLDIWTYNAE |
| | LLVLLENERTLDFHDSNVKNLYEKVKSQLKNNAKEIGNGCFEFYHKCNNECM |
| | ESVKNGTYDYPKYSEESSLNRRKIDGVKLES |
| 41 | ADTICVGYHANNSTDTVDTILEKNVTVTHSINLLESSHNGKLCSLNGIAPLQLG |
| | NCNIAGWILGNPECDLSFTANSWSYIIETSNSENGACYPGKFTDYEELREKLSS |
| | VSSFERFEIFPKATSWPNHETNKGTTAACSHSGVKSFYRNLLWIVKKGNSYTK |
| | VNKSYTNNKGKEVLVIWGVHHPPTNNVQQTLYQNASTYVSVGTSKYYRRFT |
| | PEIVARPKVRDQAGRINYYWTLLDQGDTITFEATGNLIAPWYAFALNKGSVSG |
| | IIISDANVHNCTTKCQTPHGALKSRLPFQNVHPITIGECPKYVKSTQLRMATGL |
| | RNIPSIQSRGLFGAIAGFIEGGWTGMIDGWYGYHHQNEQGSGYAADQKSTQS |
| | AIDGISNKVNSIIEKMNVQFTSVGKEFNNLEKRLENLNKKVDDGFLDVWTYN |
| | AELLILLENERTLDFHDFNVKNLYEKVKSQLRDNAKEVGNGCFEFYHKCDNE |
| | CMESIKNGTYDYPKYSEESKLNREEIYGVKLES |
| 42 | ADTICVGYHANNSTDTVDTILEKNVTVTHSVNLLENSHNGKLCSLNGKAPLQ |
| | LENCNVAGWILGNPECDFLLTAYSWSYIIETSNSKNGTCYPGEFNNYEELREQ |
| | LSTVSSLERFEIFPKATSWPNHDTTKGTTVACSHSGANSFYRNLLWIVKKENS |
| | YPKLSKSYTNNKGKEVLVIWGVHHPPTDSDQQTLYQNNNTYVSVESSKYYQ |
| | RFTPEIVARPKVRKQAGRMNYYWILLDQGDTITFEATGNLIAPWYAFALDKG |
| | SSSGIMMSDAHVQNCTTKCQTPHGALKSNLPFQNVHPITIGECPKYVKSTQLR |
| | MATGLRNIPSIQSRGLFGAIAGFIEGGWTGMIDGWYGYHHQNEQGSGYAADK |
| | KSTQIAIDGISNKVNSIIEKMNIQFTSVGKEFNNLEKRIENLNKKVDDGFLDVW |
| | TYNAELLILLENERTLDFHDFNVRNLYEKVKSQLRNNAREIGNGCFEFYHKCD |
| | NECMESIRNGTYNYPRYSEESKLNREKIDGVKLES |
| 43 | ADTLCIGYHANNSTDTVDTVLEKNVTVTHSVNLLEDKHNGKLCKLRGVAPL |
| | HLGKCNIAGWILGNPECESLSTASSWSYIVETSNSDNGTCYPGDFINYEELREQ |
| | LSSVSSFERFEIFPKTSSWPNHDSNKGVTAACPHAGAKSFYKNLIWLVKKGNS |
| | YPKLNQSYINDKGKEVLVLWGIHHPSTTADQQSLYQNADAYVFVGTSRYSKK |
| | FKPEIATRPKVRDQEGRMNYYWTLVEPGDKITFEATGNLVVPRYAFTMERNA |
| | GSGIIISDTPVHDCNTTCQTPEGAINTSLPFQNIHPITIGKCPKYVKSTKLRLATG |
| | LRNVPSIQSRGLFGAIAGFIEGGWTGMVDGWYGYHHQNEQGSGYAADLKST |
| | QNAIDKITNKVNSVIEKMNTQFTAVGKEFNHLEKRIENLNKKVDDGFLDIWT |
| | YNAELLVLLENERTLDYHDSNVKNLYEKVRNQLKNNAKEIGNGCFEFYHKC |
| | DNTCMESVKNGTYDYPKYSEEAKLNREKIDGVKLES |
| 44 | TATLCLGHHAVPNGTLVKTITDDQIEVTNATELVQSSSTGKICNNPHRILDGID |
| | CTLIDALLGDPHCDVFQNETWDLFVERSKAFSNCYPYDVPDYASLRSLVASS |
| | GTLEFITEGTWTGVTQNGGSNACKRGPGSGFFSRLNWLTKSGSTYPVLNVTM |
| | PNNDNFDKLYIWGVHHPSTNQEQTSLYVQASGRVTVSTRRSQQTIIPNIGSRP |
| | WVRGLSSRISIYWTIVKPGDVLVINSNGNLIAPRGYFKMRTGKSSIMRSDAPID |
| | TCISECITPNGSIPNDKPFQNVNKITYGACPKYVKQNTLKLATGMRNVPEKQT |
| | RGLFGAIAGFIENGWEGMIDGWYGFRHQNSEGTGQAADLKSTQAAIDQINGK |
| | LNRVIEKTNEKFHQIEKEFSEVEGRIQDLEKYVEDTKIDLWSYNAELLVALEN |
| | QHTIDLTDSEMNKLFEKTRRQLRENAEDMGNGCFKIYHKCDNACIESIRNGTY |
| | DHDVYRDEALNNRFQIKGVELKS |
| 45 | TATLCLGHHAVPNGTLVKTITNDQIEVTNATELVQSSSTGRICDSPHRILDGKN |
| | CTLIDALLGDPHCDGFQNEKWDLFVERSKAFSNCYPYDVPDYASLRSLVASS |
| | GTLEFINEGNWTGVTQSGGSYACKRGSVNSFFSRLNWLYESEYKYPALNVTM |
| | PNNGKFDKLYIWGVHHPSTDKEQTNLYVRASGRVTVSTKRSQQTVIPNIGSRP |
| | WVRGLSSRISIYWTIVKPGDILLINSTGNLIAPRGYFKIRTGKSSIMRSDAPIGTC |
| | SSECITPNGSIPNDKPFQNVNKITYGACPRYVKQNTLKLATGMRNVPEKQTRG |
| | IFGAIAGFIENGWEGMVDGWYGFRHQNSEGTGQAADLKSTQAAIDQINGKLN |
| | RLIEKTNEKFHQIEKEFSEVEGRIQDLEKYVEDTKIDLWSYNAELLVALENQH |
| | TIDLTDSEMNKLFEKTRKQLRENAEDMGNGCFKIYHKCDNACIGSIRNGTYD |
| | HDVYRDEALNNRFQIKGVELKS |
| 46 | IATLCLGHHAVPNGTLVKTITSDQIEVTNATELVQSFSTGEICNNPHRILDGMD |
| | CTLVDALLGDPHCDGFQNGTWDLFVERSKAFSNCYPYDVPDYASLRSLIASS |
| | GTLEFTNEGFNWAGVTQNGGSSACRRGSDSSFFSRLNWLYKLGNTYPVLNVT |
| | MPNNDNFDKLYIWGIHHPSTDQEQTRLYARESGRVTVSTKRSQQTVTSNVGP |
| | RPWVRGLSSRISIYWTIVKPGDILLINSNGNLIAPRGYFKMRAGKSSIMRSDAPI |
| | STCISECITPNGNVPNDKPFQNVNKITYGACPKYIRQKTLKLATGMRNVPEKQ |
| | TRGIFGAKAGFIENGWEGMVDGWYGFRHQNSEGTGQAADLKSTQTAIDQIN |
| | GKLNRVIEKTNEKFHQIEKEFSEVEGRIQDLEKYVEDTKIDLWSYNAELLVAL |
| | ENQHTIDLTDSEMNKLFEKTRRQLRENAEDIGNGCFKIYHRCDNACIGSIRNG |
| | TYNHNVYRDEALNNRFQIRGVELKS |
| 47 | TATLCLGHHAVPNGTLVKTITNDQIEVTNATELVQSSSTGRICDSPHRILDGKN |
| | CTLIDALLGDPHCDGFQNKEWDLFVERSKAYSNCYPYDVPDYASLRSLVASS |
| | GTLEFTNEGNWTGVAQDGTSYACKRGSVKSFFSRLNWLHKLEYKYPALNVT |
| | MPNNDKFDKLYIWGVHHPSTDSVQTSLYVQASGRVTVSTKRSQQTVIPNIGS |
| | RPWVRGISSRISIYWTIVKPGDILLINSTGNLIAPRGYFKIRSGKSSIMRSDAPIG |
| | NCNSECITPNGSIPNDKPFQNVNRITYGACPRYVKQNTLKLATGMRNVPEKQT |
| | RGIFGAIAGFIENGWEGMVDGWYGFRHQNSEGTGQAADLKSTQAAINQINGK |
| | LNRLIEKTNEKFHQIEKEFSEVEGRIQDLEKYVEDTKIDLWSYNAELLVALEN |
| | QHTIDLTDSEMNKLFERTRKQLRENAEDMGNGCFKIYHKCDNACIGSIRNGT |
| | YDHDVYRDEALNNRFQIKGVELKS |
| 48 | TATLCLGHHAVPNGTLVKTITNDQIEVTNATELVQSSSTGRICDSPHRILDGEN |
| | CTLIDALLGDPHCDGFQNKEWDLFVERSKAYSNCYPYDVPDYASLRSLVASS |
| | GTLEFNNESNWTGVAQNGTSYACKRSSIKSFFSRLNWLHQLKYKYPALNVTM |
| | PNNDKFDKLYIWGVHHPSTDSDQTSIYAQASGRVTVSTKRSQQTVIPNIGSRP |
| | WVRGISSRISIHWTIVKPGDILLINSTGNLIAPRGYFKIRSGKSSIMRSDAPIGKC |
| | NSECITPNGSIPNDKPFQNVNRITYGACPRYVKQNTLKLATGMRNVPEKQTRG |
| | IFGAIAGFIENGWEGMVDGWYGFRHQNSEGTGQAADLKSTQAAINQINGKLN |
| | RLIEKTNEKFHQIEKEFSEVEGRIQDLEKYVEDTKIDLWSYNAELLVALENQH |
| | TIDLTDSEMNKLFERTRKQLRENAEDMGNGCFKIYHKCDNACIGSIRNGTYD |
| | HDVYRDEALNNRFQIKGVELKS |
| 49 | IAMLCLGHHAVPNGTLVKTITNDQVEVTNATELVQSSSTGKICNHPHRILDGM |
| | DCTLIDSLLGDPHCDSFQNETWDLFVERSRAFSNCYPYDVPDYASLRSLVASS |
| | GTLEFINEDFNWAEVTQNGGSSACKRGSDSSFFSRLNWLYKSGNTYPTLNVTI |
| | PNNGNFDKLYIWGIHHPSTTKEQTRLYVQESGKVTVSTKRSQQTVIPNVGPRP |
| | WVRGLSSRISIYWTIVKPGDLLLISSTGNLIAPRGYFRLRAGKSSIIRSEAPIGTCI |
| | SECITPNGSIPNDKPFQNVNKITYGACPKYVKQNTLKLATGMRNVPEKQTRGI |
| | FGAKAGFIENGWEGMIDGWYGFRHQNSEGTGQAADLKSTQAVIDQINGKLN |
| | RIIEKTNEKFHQIEKEFSEVEGRVQDLEKYVEDTKIDLWSYNAELLIALENQHT |
| | IDLADSEMNKLFEKTRRLLRENAEDIGNGCLKIYHRCDNACIGSIRNGTYNHD |
| | VYRDEALNNRFQIKGIELKS |
| 50 | TATLCLGHHAVPNGTLVKTITDDQIEVTNATELVQNFSMGKICNNPHRILDGA |
| | NCSLIDALLGDPHCDDLQNEKWDLFIERSKAFSNCYPYDVPEYTSLRSLIASSG |
| | TLEFTNEGFNWTGVTQNGGSSACKRGPNNSFFSRLNWLYKSGNTYPILNVTM |
| | QNSDDFDKLYIWGVHHPSTDREQTNLYVQASGKVTVSTKRSQQTIIPNIGSRP |
| | WIRGLSSRISIYWTIVKPGDILMINSNGNLIAPRGYFKVYTGRSSIMKSDAPLDT |
| | CNSECITPNGSIPNDKPFQNVNKITYGACPKYIKQNTLKLATGMRNIPEKQTRG |
| | IFGAIAGFIENGWEGMVNGWYGFRHQNSEGTGQAADLKSTQAAINQINGKLN |
| | RIIEKTNEKFHQIEKEFSEVEGRIQDLEKYVEDTKIDLWSYNAELLVALENQHT |
| | IDLTDSEMNKLFEKTRKQLRENAEDMGNGCFKIYHKCDNSCMESIRNGTYDH |
| | NEYRNEALSNRFQIKSVELKS |
| 51 | TATLCLGHHAVPNGTIVKTITNDQIEVTNATELVQSSSTGGICDSPHQILDGEN |
| | CTLIDALLGDPQCDGFQNKKWDLFVERSKAYSNCYPYDVPDYASLRSLVASS |
| | GTLEFNNESNWTGVTQNGTSSACKRRSNKSFFSRLNWLTHLKYKYPALNVT |
| | MPNNEKFDKLYIWGVLHPGTDSDQIRLYAQASGRITVSTKRSQQTVIPNIGSRP |
| | RVRDVSSRISIYWTIVKPGDILLINSTGNLIAPRGYFKIRSGKSSIMRSDAPIGKC |
| | NSECITPNGSIPNDKPFQNVNRITYGACPRYIKQNTLKLATGMRNVPEKQTRGI |
| | FGAIAGFIENGWEGMVDGWYGFRHQNSEGTGQAADLKSTQAAINQINGKLN |
| | RLIGKTNEKFHQIEKEFSEVEGRIQDLEKYVEDTKIDLWSYNAELLVALENQY |
| | TIDLTDSEMNKLFERTKKQLRENAEDMGNGCFKIYHKCDNACIGSIRNGTYD |
| | HDVYRDEALNNRFQIKGVELKS |
| 52 | TATLCLGHHAVPNGTIVKTITNDQIEVTNATELVQSSSTGGICDSPHQILDGEN |
| | CTLIDALLGDPQCDGFQNKKWDLFVERSKAYSNCYPYDVPDYASLRSLVASS |
| | GTLEFNNESNWAGVTQNGTSSACKRRSNKSFFSRLNWLTHLKYKYPALNVT |
| | MPNNEKFDKLYIWGVHHPGTDSDQISLYAQASGRITVSTKRSQQTVIPNIGSRP |
| | RVRDVSSRISIYWTIVKPGDILLINSTGNLIAPRGYFKIRSGKSSIMRSDAPIGKC |
| | NSECITPNGSIPNDKPFQNVNRITYGACPRYVKQNTLKLATGMRNVPEKQTRG |
| | IFGAIAGFIENGWEGMVDGWYGFRHQNSEGTGQAADLKSTQAAINQINGKLN |
| | RLIGKTNEKFHQIEKEFSEVEGRIQDLEKYVEDTKIDLWSYNAELLVALENQH |
| | TIDLTDSEMNKLFERTKKQLRENAEDMGNGCFKIYHKCDNACIESIRNGTYDH |
| | DVYRDEALNNRFQIKGVELKS |
| 53 | TATLCLGHHAVPNGTIVKTITNDQIEVTNATELVQSSSTGGICDSPHQILDGEN |
| | CTLIDALLGDPQCDGFQNKKWDLFVERSKAYSNCYPYDVPDYASLRSLVASS |
| | GTLEFNNESNWTGVTQNGTSSSCKRRSNNSFFSRLNWLTHLKFKYPALNVTM |
| | PNNEKFDKLYIWGVHHPGTNNDQISLYTQASGRITVSTKRSQQTVIPNIGSRPR |
| | VRDIPSRISIYWTIVKPGDILLINSTGNLIAPRGYFKIRSGKSSIMRSDAPIGKCNS |
| | ECITPNGSIPNDKPFQNVNRITYGACPRYVKQNTLKLATGMRNVPEKQTRGIF |
| | GAIAGFIENGWEGMVDGWYGFRHQNSEGIGQAADLKSTQAAINQINGKLNRL |
| | IGKTNEKFHQIEKEFSEVEGRIQDLEKYVEDTKIDLWSYNAELLVALENQHTID |
| | LTDSEMNKLFERTKKQLRENAEDMGNGCFKIYHKCDNACIGSIRNGTYDHDV |
| | YRDEALNNRFQIKGVELKS |
| 54 | TATLCLGHHAVPNGTLVQTITDDQVEVTNATELVQSSSVGRICNSPHRILDGG |
| | NCTLIDALLGDPHCDAFQNEKWDLFVERSKAFSNCYPYDMQDYVSLRSLVAS |
| | SGTLEFTNEGFNWTGVTQSGGSYACKRGSGNSFFSRLNWLYQSENKYPALNV |
| | TMPNNGNFDKLYIWGVHHPSTDREQTNLYVRGSGRVTVSTKRSQQTVIPNIG |
| | PGPWVRGLSSRMSIYWTIVKPGDTLLITSNGNLIAPRGYFKIHAGKSSIMRSDA |
| | PIGTCSSECITPNGSIPNDKPFQNVNKITYGACPKYVKQNTLKLATGMRNIPEK |
| | QNRGIFGAIAGFIENGWEGMVDGWYGFRHQNSEGTGQAADLKSTQAAIDQIN |
| | GKLNRVIEKTNEKFHQIEKEFSEVEGRIQDLEKYVEDTKIDLWSYNAELLVAL |
| | ENQHTVDLTDSEMNKLFEKTRRQLRENAEDMGNGCFKIYHKCDNTCIGSIRN |
| | GTYDHDIYRDEALNNRFQIKDVVLKS |
| 55 | TATLCLGHHAVPNGTIVKTITNDQIEVTNATELVQSSSTGEICDSPHQILDGKN |
| | CTLIDALLGDPQCDGFQNKKWDLFVERSKAYSNCYPYDVPDYASLRSLVASS |
| | GTLEFNNESFNWTGVTQNGTSSACIRRSKNSFFSRLNWLTHLNFKYPALNVT |
| | MPNNEQFDKLYIWGVHHPGTDKDQIFLYAQASGRITVSTKRSQQTAIPNIGYR |
| | PRVRNIPSRISIYWTIVKPGXILLINSTGNLIAPRGYFKIRSGKSSIMRSDAPIGKC |
| | NSECITPNGSIPNDKPFQNVNRITYGACPRYVKQNTLKLATGMRNVPEKQTRG |
| | IFGAIAGFIENGWEGMVDGWYGFRHQNSEGRGQAADLKSTQAAIDQINGKLN |
| | RLIGKTNEKFHQIEKEFSEVEGRIQDLEKYVEDTKIDLWSYNAELLVALENQH |
| | TIDLTDSEMNKLFEKTKKQLRENAEDMGNGCFKIYHKCDNACIGSIRNGTYD |
| | HDVYRDEALNNRFQIKGVELKS |
| 56 | TATLCLGHHAVPNGTIVKTITNDQIEVTNATELVQSSSTGEICDSPHQILDGEN |
| | CTLIDALLGDPQCDGFQNKKWDLFVERSKAYSNCYPYDVPDYASLRSLVASS |
| | GTLEFNNESNWTGVTQNGTSSACIRRSNNSFFSRLNWLTHLKFKYPALNVTM |
| | PNNEKFDKLYIWGVHHPGTDNDQIFPYAQASGRITVSTKRSQQTVIPNIGSRPR |
| | VRNIPSRISIYWTIVKPGDILLINSTGNLIAPRGYFKIRSGKSSIMRSDAPIGKCNS |
| | ECITPNGSIPNDKPFQNVNRITYGACPRYVKQNTLKLATGMRNVPEKQTRGIF |
| | GAIAGFIENGWEGMVDGWYGFRHQNSEGIGQAADLKSTQAAIDQINGKLNRL |
| | IGKTNEKFHQIEKEFSEVEGRIQDLEKYVEDTKIDLWSYNAELLVALENQHTID |
| | LTDSEMNKLFEKTKKQLRENAEDMGNGCFKIYHKCDNACIGSIRNGTYDHDV |
| | YRDEALNNRFQIKGVELKS |
| 57 | TATLCLGHHAVPNGTIVKTITNDQIEVTNATELVQSSSTGEICDSPHQILDGEN |
| | CTLIDALLGDPQCDGFQNKKWDLFVERSKAYSNCYPYDVPDYASLRSLVASS |
| | GTLEFNNESFNWTGVTQNGTSSACIRRSNNSFFSRLNWLTHFKFKYPALNVT |
| | MPNNEQFDKLYIWGVHHPGTDNDQIFLYAQASGRITVSTKRSQQTVIPNIGSR |
| | PRVRIPSRISIYWTIVKPGDILLINSTGNLIAPRGYFKIRSGKSSIMKSDAPIGKCN |
| | SECITPNGSIPNDKPFQNVNRITYGACPRYVKQNTLKLATGMRNVPEKQTRGI |
| | FGAIAGFIENGWEGMVDGWYGFRHQNSEGRGQAADLKSTQAAIDQINGKLN |
| | RLIGKTNEKFHQIEKEFSEVEGRIQDLEKYVEDTKIDLWSYNAELLVALENQH |
| | TIDLTDSEMNKLFEKTKKQLRENAEDMGNGCFKIYHKCDNACIGSIRNGTYD |
| | HDVYRDEALNNRFQIKGVELKS |
| 58 | TATLCLGHHAVPNGTLVKTITGEQIEVTNATELVQSLSMGKICKNPHRILDGA |
| | NCTLMDALLGDPHCDGFQNEKWDLFIERSKAFSNCYPYDVPEYTSLRSIIASS |
| | GTLEFFSENFNWTGVTQNGGSNSCKRGPNSSFFSRLNWLYKSGNNYPILNVT |
| | MPNSEGFDKLYIWGVHHPSTENEQTNLYAQAPGKITVSTRSSQQTVIPNIGPRP |
| | WIRGLSSRISIYWTIVKPGDILMINSNGNLIAPRGHFKVHTGRSSIMRSDAPIDT |
| | CSSECITPNGSIPNDKPFQNVNKITYGVCPKYVKQSTLKLATGMRNIPERQTRG |
| | IFGAIAGFIENGWEGMVDGWYGFRHQNSEGTGQAADLKSTQAAINQINGKLN |
| | RVIEKTNEKFHQIEKEFSEVEGRIQDLEKYVEDTKIDLWSYNAELLVALENQH |
| | TIDLTDSEMNKLFEKTRKQLRENAEDMGNGCLKIYHKCDNSCMRSIRNGTYD |
| | HNEYRDEALNNRFQIKSVELKL |
| 59 | TATLCLGHHAVPNGTIVKTITNDQIEVTNATELVQSSSTGEICNSPHQILDGEN |
| | CTLIDALLGDPQCDGFQNKKWDLFVERSKAHSNCYPYDVPDYASLRSLVASS |
| | GTLEFNNESNWTGVTQNGTSSACIRRSNNSFFSRLNWLTHLNFKYPALNVTM |
| | PNNEQFDKLYIWGVHHPGTDKDQIFLYAQASGRITVSTKRSQQAVIPNIGSRPR |
| | VRDIPSRVSIYWTIVKPGDILLINSTGNLIAPRGYFKIRSGKSSIMRSDAPIGKCN |
| | SSCITPNGSIPNDKPFQNVNRITYGACPRYVKQNTLKLATGMRNVPEKQTRGI |
| | FGAIAGFIENGWEGMVDGWYGFRHQNSEGRGQAADLKSTQAAIDQINGKLN |
| | RLIGKTNEKFHQIEKEFSEVEGRIQDLEKYVEDTKIDLWSYNAELLVALENQH |
| | TIDLTDSEMNKLFEKTKKQLRENAEDMGNGCFKIYHKCDNACIGSIRNGTYD |
| | HDVYRDEALNNRFQIKGVELKS |
| 60 | TATLCLGHHAVPNGTLVKTITNDQIEVTNATELVQSSSTGKICNSPHQILDGKN |
| | CTLIDALLGDPHCEEFQNKEWDLFVERSTAYSNCYPYYVPDYASLRSLVASSG |
| | TLKFTKEDFNWTGVSQDGSSFSCKRKSVNSFFSRLNWLHKSTNKYPALNVTM |
| | PNIDKFDKLYIWGVHHPSTDSDQISLYAQASGRVMVSTKRSQQAVIPNIGSRP |
| | WVRGVSSIISIHWTIVKPGDILLINSTGNLIAPRGYFKIRGGKSSIMRSDEPIDNC |
| | NFDCITPNGSIPNDKPFQNVNRITYGACPRYVKQNTLKLATGMRNVPEKQTRG |
| | IFGAIAGFIENGWEGMVNGWYGFRHQNSEGTGQAADLKSTQAAISQINGKLN |
| | RLIEKTNEKFHQIEKEFSEVEGRVQDLEKYVEDTKIDLWSYNAELLVALENQH |
| | TIDLTDSEMNKLFERTRKQLRENAEDMGNGCFKIYHKCDNACIGSIRNGTYD |
| | HDVYRDEALNNRFQIKGVELKS |
| 61 | TATLCLGHHAVPNGTLVKTITDDQVEVTNATELVQNSSAGRICDNPHRILDGK |
| | NCTLIDALLGDPHCDSFKNKEWDLFVERSEAYSDCYPYDVPDYDYIRSIVASS |
| | GTLEFTNESFNWTGVAQDGTSNSCKRGSVKSFFSRLNWLHKLEYKYPALNVT |
| | MPNNDRFDKLYIWGVHHPSTDSDQTNLYVQASGKVVVSTKRSQQTVIPNIGF |
| | RPWIRGISSRISIYWTIVKPGDILLINSTGNLIAPRGYFKIRSGKSSIMRSDTPIGN |
| | CNSECITPNGSIPNDKPFQNVNRITYGACPRYIKRNTLKLATGMRNVPEKQTR |
| | GIFGAIAGFIENGWEGMIDGWYGFRHQNSEGTGQAADLKSTQAAINQINGKL |
| | NRLVEKTNEKFHQIEKEFSEVEGRIQDLEKYIEDTKIDLWSYNAELLIALENQH |
| | TIDLTDSEMNKLFEKTKKQLRENAEDMGNGCFKIYHKCDNACIGSIRNGTYD |
| | HNVYRDEALNNRFQIKGVKLKS |
| 62 | TATLCLGHHAVPNGTLVKTVTDDQIEVTNATELVQSLSTGKICNSPHQILDGG |
| | NCTLIDALLGDPHCDRFQNRKWDLFVERSTAYSNCYPYDVPDYASLRSLIASS |
| | GTLEFTKEDFNWTGVAQDGASYSCKRGSVKSFFSRLNWLHKLEYKYPALNV |
| | TMPNNDRFNKLYIWGVHHPSTDSDQTRLYVQASGKVTVSTKRSQQTVIPNIG |
| | PIPWIRGVSSRISIYWTIVNPGDILLINSTGNLIAPRGYFKLRNGRSSVMRSDAPI |
| | DNCNSECITPNGSIPNDKPFQNVNRITYGTCPRYVKQNTLKLATGMRNVPEKQ |
| | TRGIFGAIAGFIENGWEGMVDGWYGFRHQNSEGTGQAADLKSTQTAINQING |
| | KLNRLIEKTNEKFHQIEKEFSEVEGRIQDLEKYVEDTKIDLWSYNAELLVALE |
| | NQHTVDLTDSEMNKLFEKTRRQLRENAEDMGNGCFKIYHKCDNACIGSIING |
| | TYDHDVYRDEALNNRFQIKGVELKS |
| 63 | MAMLCLGHHAVPNGTLVKTITNDHIEVTNATELVQSSSMGRICNSPHQILDGE |
| | NCTLIDALLGDPHCDAFQNKEWDLFVERSTAYSNCYPYDVPDYASLRALVAS |
| | SGTLEFNNENFNWTGVAQNGASTACKRRSSNSFFSRLNWLYQLRYKYPALN |
| | VTMPNNEKFDKLYIWGVHHPSTDNDQISLYAQASGRVIVSTKRSQQTVIPNIG |
| | SRPWVRGVSSTISIYWTIVKAGDILLINSTGNLIAPRGYFKIRNGKSSIMRSNAPI |
| | GRCNAGCITPNGSISNDKPFQNVNRITYGACPRYVKQKTLRLATGMRNVPEK |
| | QTRGIFGAIAGFIENGWEGMVDGWYGFRHQNSEGTGQAADLKSTQAAISQIS |
| | GKLNRLIGKTNEKFHQIEKEFSEVEGRIQDIEKYVEDTKIDLWSYNAELLVALE |
| | NQHTIDLTDSEMNKLFERTRKQLRENAEDMGNGCFKIYHKCDNACIESIRNGT |
| | YDHDVYRDEALNNRFQIKGIELKS |
| 64 | TATLCLGHHAVPNGTLVKTITNDQIEVTNATELVQSSSTGRICDSPHRILDGKN |
| | CTLIDALLGDPHCDGFQNKEWDLFIERSKAYSNCYPYDVPDYSSLRSLVASSG |
| | TLEFTNEDFNWTGVAQDGGSYSCKRGSVKSFFSRLNWLHKLEYKYPALNVT |
| | MPNNDKFDKLYIWGVHHPATDKDQISLYAQAAGRIIVSTKRSQQAVIPNIGSR |
| | PRVRDIPSRISIYWTIVRPGDILLINSPGNLIAPRGYFKIRSGKSSIMRSDAPIGKC |
| | NSACITPNGSIPNDKPFQKVNRITYGACPRYVKQNAVKLATGMRNRPEKQTR |
| | GIFGAIAGFIENGWEGMVHGWDGFTHQPSGGTGQAADLKSTQAAIDQINGKL |
| | NRLIGKTNEKFHQIEKEFSEVEGRIQDLEKYVEDTKIDLWSYNAELLVALENQ |
| | HTIDLTDSEMNKLFEKTKKQLRENAEDMGNGCFKIYHKCDNACIGSIRNGTY |
| | DHDVYRDEALNNRFQIKGVELKS |
| 65 | TATLCLGHHAVPNGTIVKTITNDRIEVTNATELVQNSSIGEICDSPHQILDGENC |
| | TLIDALLGDPQCDGFQNKKWDLFVERSKAYSNCYPYDVPDYASLRSLVASSG |
| | TLEFNNESNWTGVKQNGTSSACIRKSSSSFFSRLNWLTHLNYTYPALNVTMP |
| | NNEQFDKLYIWGVHHPGTDKDQIFLYAQSSGRITVSTKRSQQAVIPNIGSRPRI |
| | RDIPSRISIYWTIVKPGDILLINSTGNLIAPRGYFKIQSGKSSIMRSDAPIGKCKSE |
| | CITPNGSIPNDKPFQNVNRITYGACPRYVKHSTLKLATGMRNVPEKQTRGIFG |
| | AIAGFIENGWEGMVDGWYGFRHQNSEGRGQAADLKSTQAAIDQINGKLNRLI |
| | GKTNEKFHQIEKEFSEVEGRIQDLEKYVEDTKIDLWSYNAELLVALENQHTID |
| | LTDSEMNKLFEKTKKQLRENAEDMGNGCFKIYHKCDNACIGSIRNGTYDHNV |
| | YRDEALNNRFQIKGVELKS |
| 66 | SDQICIGYHANNSTEQVDTIMEKNVTVTHAQDILERTHNGKLCDLNGVKPLIL |
| | RDCSVAGWLLGNPMCDEFINVPEWSYIVEKASPANDLCYPGNFNDYEELKHL |
| | LSRISHFEKIQIIPKSSWSNHDASSGVSSACPYLGKSSFFRNVVWLIKKNSTYPT |
| | IKRSYNNTNQEDLLVLWGIHHPNDAAEQTKLYQNPTTYISVGTSTLNQRLVPE |
| | IATRPKVNGQSGRIEFFWTILKPNDAINFESNGNFIAPEYAYKIVKKGDSTIMKS |
| | ELEYGNCNTKCQTPMGAINSSMPFHNIHPLTIGECPKYVKSNRLVLATGLRNA |
| | PQRERRRKKRGLFGAIAGFIEGGWQGMVDGWYGYHHSNEQGSGYAADQEST |
| | QKAIDGVTNKVNSIINKMNTQFEAVGREFNNLERRIENLNKKMEDGFLDVWT |
| | YNAELLVLMENERTLDFHDSNVKNLYDKVRLQLRDNAKELGNGCFEFYHKC |
| | DNECMESVKNGTYDYPQYSEEARLNREEISGVKLES |
| 67 | SDQICIGYHANNSTELVDTIMEKNVTVTHAQDILEKTHNGKLCDLDGVKPLIL |
| | RDCSVAGWLLGNPMCDEFINVPEWSYIVEKANPANDLCYPGDFNDYEELKHL |
| | LSRINHFEKIQIIPKSSWPNHEASSGVSSACPYQGKSSFFRNVVWLIKKNSAYPT |
| | IKRSYNNTNQEDLLVLWGIHHPNDAAEQTKLYQNPTTYISVGTSTLNQRLVPK |
| | IATRSKVNGQSGRMEFFWTILKPNDAINFESNGNFIAPEYAYKIVKKGDSAIM |
| | KSELEYGNCNTKCQTPLGAINSSMPFHNIHPLTIGECPKYVKSNRLVLATGLR |
| | NTPQRERRRKKRGLFGAIAGFIEGGWQGMVDGWYGYHHSNEQGSGYAADK |
| | ESTQKAIDGVTNKVNSIIDKMNTQFEAVGREFNNLERRIENLNKKMEDGFLDV |
| | WTYNAELLVLMENERTLDFHDSNVKNLYDKVRLQLRDNAKELGNGCFEFYH |
| | KCDNECMESVKNGTYDYPQYSEEARLNREEISGVKLES |
| 68 | SDQICIGSHANNSTEQVDTIMEKNVTVTHAQDILEKTHNGKLCDLDGVKPLIL |
| | RDCSVAGWLLGNPMCDEFINVPEWSYIVEKASPANDLCYPGDFNDYEELKHL |
| | LSRINHFEKIQIIPKSSWSNHEASSGVSSACPYLGRPSFFRNVVWLIKKNNTYPT |
| | IKRSYNNTNQEDLLVLWGIHHPNDEAEQIKLYQNPTTYISVGTSTLNQRLVPKI |
| | ATRSKVNGQSGRMEFFWAILKPNDAINFESNGNFIAPEYAYKIVKKGDSAIMK |
| | SELEYGNCNTKCQTPMGAINSSMPFHNIHPLTIGECPKYVKSNRLVLATGLRN |
| | APQRERRRKKRGLFGAIAGFIEGGWQGMVDGWYGYHHSNEQGSGYAADKE |
| | STQKAIDGVTNKVNSIIDKMNTQFEAIGREFNNLERRIENLNKKMEDGFLDVW |
| | TYNAELLVLMENERTLDFHDSNVKNLYEKVRLQLRDNAKGLGNGCFEFYHK |
| | CDNECMESVKNGTYDYPQYSEEATLNREEISGVKLES |
| 69 | SDQICIGYHANNSTEQVDTIMEKNVTVTHAQDILEKTHNGKLCDLDGVKPLIL |
| | RDCSVAGWLLGNPMCDEFINVPEWSYIVEKANPVNDLCYPGDFNDYEELKHL |
| | LSRINHFEKIQIIPKSSWSSHEASLGVSSACPYQGKSSFFRNVVWLIKKNSTYPT |
| | IKRSYNNTNQEDLLVLWGIHHPNDAAEQTKLYQNPTTYISVGTSTLNQRLVPR |
| | IATRSKVNGQSGRMEFFWTILKPNDAINFESNGNFIAPEYAYKIVKKGDSTIMK |
| | SELEYGNCNTKCQTPMGAINSSMPFHNIHPLTIGECPKYVKSNRLVLATGLRN |
| | SPQRERRRKKRGLFGAIAGFIEGGWQGMVDGWYGYHHSNEQGSGYAADKES |
| | TQKAIDGVTNKVNSIIDKMNTQFEAVGREFNNLERRIENLNKKMEDGFLDVW |
| | TYNAELLVLMENERTLDFHDSNVKNLYDKVRLQLRDNAKELGNGCFEFYHK |
| | CDNECMESVRNGTYDYPQYSEEARLKREEISGVKLES |
| 70 | SDQICIGYHANNSTEQVDTIMEKNVTVTHAQDILEKTHNGKLCDLDGVKPLIL |
| | RDCSVAGWLLGNPMCDEFINVPEWSYIVEKANPANDLCYPGNFNDYEELKHL |
| | LSRINHFEKIQIIPKSSWSDHEASSGVSSACPYQGTPSFFRNVIWLIKKNNTYPTI |
| | KRSYNNTNQEDLLILWGIHHSNDAAEQTKLYQNPTTYISVGTSTLNQRLVPKI |
| | ATRSKVNGQSGRMDFFWTILKPNDAINFESNGNFIAPEYAYKIVKKGDSAILK |
| | SEVEYGNCNTKCQTPIGAINSSMPFHNIHPLTIGECPKYVKSNKLVLATGLRNS |
| | PLRERRRKKRGLFGAIAGFIEGGWQGMVDGWYGYHHSNEQGSGYAADKEST |
| | QKAIDGVTNKVNSIIDKMNTQFEAVGREFNNLERRIENLNKKMEDGFLDVWT |
| | YNAELLVLMENERTLDFHDSNVKNLYDKVRLQLKDNAKELGNGCFEFYHKC |
| | DNECMESVRNGTYDYPQYSEEARLKREEISGVKLES |
| 71 | SDQICIGYHANNSTEQVDTIMEKNVTVTHAQDILEKTHNGKLCNLDGVKPLIL |
| | RDCSVAGWLLGNPMCDEFLNVPEWSYIVEKINPANDLCYPGNFNDYEELKHL |
| | LSRINHFEKIQIIPKNSWSDHEASGVSSACPYQGRSSFFRNVVWLTKRDNAYPT |
| | IKRSYNNTNQEDLLVLWGIHHPNDAAEQTRLYQNPTTYISVGTSTLNQRLVPK |
| | IATRSKVNGQSGRMEFFWTILKSNDAINFESNGNFIAPENAYKIVKKGDSTIMK |
| | SELEYGNCNTKCQTPIGAINSSMPFHNIHPLTIGECPKYVKSNRLVLATGLRNS |
| | PQRERRRKKRGLFGAIAGFIEGGWQGMVDGWYGYHHSNEQGSGYAADKEST |
| | QKAIDGVTNKVNSIIDKMNTQFEAVGREFNNLERRIENLNKKMEDGFLDVWT |
| | YNAELLVLMENERTLDFHDSNVKNLYDKVRLQLRDNAKELGNGCFEFYHRC |
| | DNECMESVRNGTYDYPQYSEEARLKREEISGVKLES |
| 72 | SDQICIGYHANNSTEQVDTIMEKNVTVTHAQDILEKTHNGKLCNLDGVKPLIL |
| | KDCSVAGWLLGNPMCDEFLNVSEWSYIVEKASPANGLCYPGDFNDYEELKH |
| | LLSRINHLKKIKIIPKSYWSNHEASSGVSAACSYLGEPSFFRNVVWLIKKNNTY |
| | PPIKVNYTNTNQEDLLVLWGIHHPNDEKEQIRIYQNPNTSISVGTSTLNQRLVP |
| | KIATRPKVNGQSGRMEFFWTILKPNDSINFDSNGNFIAPEYAYKIAKKGDSVIM |
| | KSELEYGNCNTKCQTPMGAINSSMPFHNIHPLTIGECPKYVKSNRLVLATGLR |
| | NAPQRERRRKKRGLFGAIAGFIEGGWQGMVDGWYGYHHSNEQGSGYAADK |
| | ESTQKAIDGITNKVNSIIDKMNTQFEIVGREFNNLERRIENLNKKMEDGFLDV |
| | WTYNAELLVLMENERTLDFHDSNVKNLYEKVRLQLRDNAKELGNGCFEFYH |
| | KCDNECMESVRNGTYDYPQYSEEARLSREEISGVKMES |
| 73 | SDQICIGYHANNSTEQVDTIMEKNVTVTHAQDILEKTHNGKLCDLDGVKPLIL |
| | RDCSVAGWLLGNPMCDEFLNVPEWSYIVEKINPANDLCYPGNFNDYEELKHL |
| | LSRINHFEKIQIIPKSSWSDHEASSGVSSACPYQGRSSFFRNVVWLIKKNDAYP |
| | TIKISYNNTNQEDLLVLWGIHHPNDAAEQTRLYQNPTTYISVGTSTLNLRLVP |
| | KIATRSKVNGQSGRMEFFWTILKPNDAINFESNGNFIAPENAYKIVKKGDSTIM |
| | KSELEYGNCNTKCQTPVGAINSSMPFHNIHPLTIGECPKYVKSNRLVLATGLR |
| | NSPQRERRRKKRGLFGAIAGFIEGGWQGMVDGWYGYHHSNEQGSGYAADK |
| | ESTQKAIDGVTNKVNSIIDKMNTQFEAVGREFNNLERRIENLNKKMEDGFLDV |
| | WTYNAELLVLMENERTLDFHDSNVKNLYDKVRLQLRDNAKELGNGCFEFYH |
| | RCDNECMESVRNGTYDYPQYSEESRLKREEISGVKLES |
| 74 | SDQICIGYHANNSTEQVDTIMEKNVTVTHAQDILEKTHNGKLCDLDGVRPLIL |
| | RDCSVAGWLLGNPMCDEFINVPEWSYIVEKANPVNDLCYPGVFNDYEELKHL |
| | LSRINHFEKIQIIPKSSWPSHEASLGVSAACPYQGQSSFFRNVVWLIKKNNTYP |
| | TIKRSYNNTNQEDLLVMWGIHHPNDAAEQTKLYQNPTTYISVGTSTLNQRLTP |
| | RIATRSKVNGQSGRMEFFWTILKPNDAINFESNGNFIAPEYAYKIVKKGDSTIM |
| | RSELEYGNCNTKCQTPMGAINSSMPFHNIHPLTIGECPKYVKSTRLVLATGLR |
| | NSPQRERRRKKRGLFGAIAGFIEGGWQGMVDGWYGYHHSNEQGSGYAADK |
| | ESTQKAIDGVTNKVNSIIDKMNTQFEAVGREFNNLERRIENLNKKMEDGFLDV |
| | WTYNAELLVLMENERTLDFHDSNVKNLYDKVRLQLRDNAKELGNGCFEFYH |
| | KCDNECMESVRNGTYDYPQYSEEARLKREEISGVKLES |
| 75 | SDQICIGYHANNSTEQVDTIMEKNVTVTHAQDILEKTHNGKLCNLDGVKPLIL |
| | RDCSVAGWLLGNPMCDEFLNVPEWSYIVEKINPANDLCYPGNFNDYEELKHL |
| | LSRINHFEKIQIIPKDSWSDHEASGVSSACPYQGRSSFFRNVVWLTKKNDAYPT |
| | IKKSYNNTNQEDLLVLWGIHHPNDAAEQTRLYQNPTTYISVGTSTLNQRLVPK |
| | IATRSKVNGQSGRMEFFWTILKSNDAINFESNGNFIAPENAYKIVKKGDSTIMK |
| | SELEYSNCNTKCQTPIGAINSSMPFHNIHPLTIGECPKYVKSNRLVLATGLRNS |
| | PQRERRRKKRGLFGAIAGFIEGGWQGMVDGWYGYHHSNEQGSGYAADKEST |
| | QRAIDGVTNKVNSIIDKMNTQFEAVGREFNNLERRIENLNKKMEDGFLDVWT |
| | YNAELLVLMENERTLDFHDSNVKNLYDKVRLQLRDNAKELGNGCFEFYHRC |
| | DNECMESVRNGTYDYPQYSEEARLKREEISGVKLES |
| 76 | DRICTGITSSNSPHVVKTATQGEVNVTGVIPLTTTPTKSHFANLKGTQTRGKLC |
| | PNCFNCTDLDVALGRPKCMGNTPSAKVSILHEVKPATSGCFPIMHDRTKIRQL |
| | PNLLRGYENIRLSTSNVINTETAPRGSYKVGTSGSCPNVANGNGFFNTMAWVI |
| | PKDNNKTAINPVTVEVPYICSEGEDQITVWGFHSDDKTQMERLYGDSNPQKF |
| | TSSANGVTTHYVSQIGGFPNQTEDEGLKQSGRIVVDYMVQKPGKTGTIVYQR |
| | GILLPQKVWCASGRSKVIKGSLPLIGEADCLHEKYGGLNKSKPYYTGEHAKAI |
| | GNCPIWVKTPLKLANGTKYRPPAKLLKERGFFGAIAGFLEGGWEGMIAGWH |
| | GYTSHGAHGVAVAADLKSTQEAINKITKNLNYLSELEVKNLQRLSGAMNELH |
| | DEILELDEKVDDLRADTISSQIELAVLLSNEGIINSEDEHLLALERKLKKMLGPS |
| | AVEIGNGCFETKHKCNQTCLDRIAAGTFNAGDFSLPTFDSLNITAASLNDDGL |
| | DNHTILLYY |
| 77 | DRICTGITSSNSPHVVKTATQGEVNVTGVIPLTTTPTKSHFANLKGTQTRGKLC |
| | PNCLNCTDMDVALGRPKCMGTIPSAKVSILHEVKPVTSGCFPIMHDRTKIRQL |
| | PNLLRGYENIRLSTRNVINAETAPGGPYTVGTSGSCPNVTNGKGFFETMAWA |
| | VPKNKNKTATNPLTVEVPYICTKGEDQITVWGFHSDDETLMVILYGDSKPQK |
| | FTSSANGVTTHYVSQIGGFPNQTEDEGLKQSGRIVVDYIVQKPGKTGTIVYQR |
| | GVLLPQKVWCASGRSKVIKGSLPLIGEADCLHEKYGGLNKSKPYYTGEHAKA |
| | IGNCPIWVKTPLKLANGTKYRPPAKLLKERGFFGAIAGFLEGGWEGMIAGWH |
| | GYTSHGAHGVAVAADLKSTQEAINKITKNLNSLSELEVKNLQRLSGAMDELH |
| | NEILELDEKVDDLRADTISSQIELAVLLSNEGIINSEDEHLLALERKLKKMLGPS |
| | AVEIGNGCFETKHKCNQTCLDRIAAGTFNAGEFSLPTFDSLNITAASLNDDGL |
| | DNHTILLYY |
| 78 | DRICTGITSSNSPHVVKTATQGEVNVTGVIPLTTTPTKSHFANLKGTQTRGKLC |
| | PNCLNCTDLDVALGRPKCMGNIPSAKASILHEVKPGTSGCFPIMHDRTKIRQL |
| | PNLLRGYENIRLSARNVTNAETAPGGPYIVGTSGSCPNVTNGNGFFATMAWA |
| | VPKNKTATNPLTVEVPYICTKGEDQITVWGFHSDDETQMVKLYGDSKPQKFT |
| | SSANGVTTHYVSQIGGFPNQAEDEGLPQSGRIVVDYMVQKPGKTGTIAYQRG |
| | VLLPQKVWCASGRRKVIEGSLPLIGEADCLHEKYGGLNKSKPYYTGEHAKAI |
| | GNCPIWVKTPLKLANGTKYRPPAKLLKERGFFGAIAGFLEGGWEGMIAGWH |
| | GYTSHGAHGVAVAADLKSTQEAINKITKNLFSLSELEVKNLHRLSGAMDELH |
| | NEILELDEKVDDLRADTISSQIELAVLLSNEGIINSEDEHLLALERKLKKMLGPS |
| | AVEIGNGCFETKHKCNQTCLDRIAAGTFNAGEFSLPTFDSLNITAASLNDDGL |
| | DNHTILLYY |
| 79 | DRICTGITSSNSPHVVKTATQGEVNVTGVIPLTTTPTKSHFANLKGTKTRGKLC |
| | PKCLNCTDLDVALGRPKCMGTIPSAKASILHEVKPVTSGCFPIMHDRTKIRQLP |
| | NLLRGYENIRLSTHNVINAEAAPGGPYIVGTSGSCPNVTNGNGFFATMAWAV |
| | PKNNNNKTATNPLTVEVPFICTEGEDQITVWGFHSDNEIQMVKLYGDSKPQKF |
| | TSSANGVTTHYVSQIGGFPKQAEDGGLPQSGRIVVDYMVQKSGKTGTITYQR |
| | GILLPQKVWCASGRSKVIKGSLPLIGEADCLHEKYGGLNKSKPYYTGEHAKAI |
| | GNCPIWVKTPLKLANGTKYRPPAKLLKERGFFGAIAGFLEGGWEGMIAGWH |
| | GYTSHGAHGVAVAADLKSTQEAINKITKNLNSLSELEVKNLQRLSGAMDELH |
| | NEILELDEKVDDLRADTISSQIELAVLLSNEGIINSEDEHLLALERKLKKMLGPS |
| | AVDIGNGCFETKHKCNQTCLDRIAAGTFNAGEFSLPTFDSLNITAASLNDDGL |
| | DNHTILLYY |
| 80 | DRICTGITSSNSPHVVKTATQGEVNVTGVIPLTTTPTKSHFANLKGTKTRGKLC |
| | PNCLNCTDLDVALGRPMCIGNIPSAKASILHEVRPVTSGCFPIMHDRTKIRQLP |
| | NLLRGYEHIRLSTHNVINAERAPGGPYRLGTSGSCPNVTSRSGFFATMAWAVP |
| | RDNKTATNPLTVEVPYICTKGEDQITVWGFHSDNETQMKNLYGDSNPQKFTS |
| | SANGITTHYVSQIGGFPNQTEDGGLPQSGRIVVDYMVQKPGKTGTIVYQRGVL |
| | LPQKVWCASGRSKVIKGSLPLIGEADCLHEKYGGLNKSKPYYTGEHAKAIGN |
| | CPIWVKTPLKLANGTKYRPPAKLLKERGFFGAIAGFLEGGWEGMIAGWHGYT |
| | SHGAHGVAVAADLKSTQEAINKITKNLNSLSELEVKNLQRLSGAMDELHNEIL |
| | ELDEKVDDLRADTISSQIELAVLLSNEGIINSEDEHLLALERKLKKMLGPSAVD |
| | IGNGCFETKHKCNQTCLDRIAAGTFNAGEFSLPTFDSLNITAASLNDDGLDNH |
| | TILLYY |
| 81 | DRICTGITSSNSPHVVKTATQGEVNVTGVIPLTTTLTKSHFANLKGTKTRGKLC |
| | PKCLNCTDLDVALGRPKCTGNIPSAKVSILHEVRPVTSGCFPIMHDRTKIRQLP |
| | NLLRGYERIRLSNHNVINAEKAPGGPYKIGTSGSCPNVTNGNGFFATMAWAV |
| | PKNENNKTATNSLTIEVPYICTEGEDQITVWGFHSDNEIQMVKLYGDSKPQKF |
| | TSSANGVTTHYVSQIGGFPNQIEDGGLPQSGRIVVDYMVQKSGKTGTITYQRG |
| | ILLPQKVWCASGRSKIIKGSLPLIGEADCLHEKYGGLNKSKPYYTGEHAKAIG |
| | NCPIWVKTPLKLANGTKYRPPAKLLKERGFFGAIAGFLEGGWEGMIAGWHG |
| | YTSHGAHGVAVAADLKSTQEAINKITKNLNSLSELEVKNLQRLSGAMDELHN |
| | EILELDEKVDDLRADTISSQIELAVLLSNEGIINSEDEHLLALERKLKKMLGPSA |
| | VEIGNGCFETKHKCNQTCLDRIAAGTFNAGEFSLPTFDSLNITAASLNDDGLD |
| | NHTILLYY |
| 82 | DRICTGITSSNSPHVVKTATQGEVNVTGAIPLTTTPAKSHFANLKGTKTRGKLC |
| | PTCLNCTDLDVALGGPMCVGITPSAKASILHEVRPVTSGCFPIMHDRTKIRQLP |
| | NLLRGYEKIRLSAQNVINAEKAPGGPYKLGTSGSCPNATSKSGFFATMAWAV |
| | PRDDNKTATNPLTVEVPHICANEEDQITVWGFHSDNKTQMKNLYGDSNPQKF |
| | TSSANGITTHYVSQIGGFPDQTEDGGLPQSGRIVVDYMVQKPGKTGTIVYQRG |
| | ILLPQKVWCASGRSKVIKGSLPLIGEADCLHEKYGGLNKSKPYYTGEHAKAIG |
| | NCPIWVKTPLKLANGTKYRPPAKLLKERGFFGAIAGFLEGGWEGMIAGWHG |
| | YTSHGAHGVAVAADLKSTQEAINKITKNLNSLSELEVKNLQRLSGAMDELHN |
| | EILELDEKVDDLRADTISSQIELAVLLSNEGIINSEDEHLLALERKLKKMLGPSA |
| | VDIGNGCFETKHKCNQTCLDRIAAGTFNAGEFSLPTFDSLNITAASLNDDGLD |
| | NHTILLYY |
| 83 | DRICTGITSSNSPHVVKTATQGEVNVTGVIPLTTTPTKSYFANLKGTRTRGKLC |
| | PDCLNCTDLDVALGRPMCVGTTPSAKASILHEVRPVTSGCFPIMHDRTKIRQL |
| | PNLLRGYENIRLSTQNVIDAENAPGGPYRLGTSGSCPNATSKSGFFATMAWA |
| | VPKDNNKNATNPLTVEVPYVCKEGEDQITVWGFHSDNKTQMKNLYGDSNPQ |
| | KFTSSANGVTTHYVSQIGGFPAQTEDGGLPQSGRIVVDYMVQKPRKTGTIVY |
| | QRGVLLPQRVWCASGRSKVIKGSLPLIGEADCLHEKYGGLNKSKPYYTGEHA |
| | KAIGNCPIWVKTPLKLANGTKYRPPAKLLKERGFFGAIAGFLEGGWEGMIAG |
| | WHGYTSHGAHGVAVAADLKSTQEAINKITKNLNSLSELEVKNLQRLSGAMD |
| | ELHNEILELDEKVDDLRADTISSQIELAVLLSNEGIINSEDEHLLALERKLKKML |
| | GPSAVDIGNGCFETKHKCNQTCLDRIAAGTFNAGEFSLPTFDSLNITAASLNDD |
| | GLDNHTILLYY |
| 84 | DRICTGITSSNSPHVVKTATQGEVNVTGVIPLTTTPTKSYFANLKGTRTRGKLC |
| | PDCLNCTDLDVALGRPMCVGTTPSAKASILHEVRPVTSGCFPIMHDRTKIRQL |
| | PNLLRGYENIRLSTQNVIDAEKAPGGPYRLGTSGSCPNATSKSGFFATMAWA |
| | VPKDNYKNATNPLTVEVPYICTEGEGQITVWGFHSDNKPQMKNLYGDSNPQ |
| | KFTSSASGVTTHYVSQIGDFPDQTEDGGLPQSGRIVVDYMMQKPGKTGTIVY |
| | QRGVLLPQKVWCASGRSKVIKGSLPLIGEADCLHEKYGGLNKSKPYYTGEHA |
| | KAIGNCPIWVITPQKLANGTTFSPPAKLLKERGFFGAIAGFLEGGWEGMIAGW |
| | HGYTSHGAHGVAVAADLKSTQEAINKITKNLNSLSELEVKNLQRLSGAMDEL |
| | HNEILELDEKVDDLRADTISSQIELAVLLSNEGIINSEDEHLLALERKLKKMLG |
| | PSAVDIGNGCFETKHKCNQTCLDRIAAGTFNAGEFSLPTFDSLNITAASLNDDG |
| | LDNHTILLYY |
| 85 | DRICTGITSSISPLVDKTATQGEVNVTGVIPLTTTPTKSYFANVKGTRTRGKLCP |
| | DCLNCTDLDVALGRPMCVGTTPSAKASILHEVRPVTSGCFPIMHDRTKIRQLP |
| | NLLRGYENIRLSTQNVIDAQKAPGGPYRLGTSGSCPNATSKIGFFATMACAVP |
| | KDNYKNATNPLTVEVPYIRTEGEDQITVWGFHSDNKTQMKNLYGDSNPPKFT |
| | SSANGVTTHYVSQTGDFPDQTEDGGLPPSGRIVVDYMMQKPGKTGTIAYQRG |
| | VLLPQKVWCASGRSKVIKGSLPLIGEADCLHEKYGGLNKSKPPHTGEHTKAIG |
| | NCPIWVKTPLKLANGTKYRPSAKLLKERGFFGAIAGFLEGGWEGMIAGWHG |
| | YTSHGAHGVAVAADLKSTQEAINKITKNLNSLSELEVKNLQRLSGAMDELHN |
| | EILELDEKVDDLRADTISSQIELAVLLSNEGIINSEDEHLLALERKLKKMLGPSA |
| | VDIGNGCFETKHKCNQTCLDRIAAGTFNAGEFFLPTFDSLNITAASLNDDGLD |
| | NHTILLYY |
| 86 | DRICTEITSSNSPLVVKTATQGEVNVTGVIPLTTTPTKSYFANLKGTRTRGKLC |
| | PDCLNCTDLDVALGRPMCVGTTPSAKASILHEVRPVTSGCFPIMHDRTKIRQL |
| | PNLLRGYENIRLSTQNVIDAEKAPGGPYRLGTSGSCPNATSKIGFFATMAWAV |
| | PKDNYKNATNPLTVEVPYICTEGEDQITVWGFHSDNKTQMKNLYGDSNPQKF |
| | TSSANGVTTHYVSQIGDFPDQTEDGGLPQSGRIVVDYMMQKPGKTGPIVYQR |
| | GVLLPQKVWCASGRSKVIKGSLPLIGEADCLHEKYGGLNKSKYSHTGDHAKT |
| | LGNCPIWVKTPLKLANGTKYRPPAKLLKERGFFGAIAGFLEGGWEGMIAGWH |
| | GYTSHGAHGVAVAADLKSTQEAINKITKNLNSLSELEVKNLQRLSGAMDELH |
| | NEILELDEKVDDLRADTISSQIELAVLLSNEGIINSEDEHLLALERKLKKMLGPS |
| | AVDIGNGCFETKHKCNQTCLDRIAAGTFNAGEFSLPTFDSLNITAASLNDDGL |
| | DNHTILLYY |
| 87 | DRICTGITSSNSPHVVKTATQGEVNVTGVIPLTTTPTKSHFANLKGTETRGKLC |
| | PKCLNCTDLDVALGRPKCTGTTPSARASILHEVRPVTSGCFPILHDRTKIRQLP |
| | NLLRGYEHIRLSTHNVINAENAPGGPYKIGTSGSCPNITNGNGFFATMAWAVP |
| | KNDKNKTATNPLSVEVPYICTEGEDQITVWGFHSDNETQMAKLYGDSKPQKF |
| | TSSANGVATHYVSQIGGFPNQTEDGGLPQSGRIVVDYMVQKSGKTGTITYQR |
| | GILLPQRGWCASGRSKVIKGSLPLFGEADCLHEKYGGLNKSKPYYTGEHAKAI |
| | GNCPIWVKTPLKLANGTKYRPPAKLFKERGFFGAIAGFLEGGWEGMIAGWHG |
| | YTSHGAHGVPVAADLKSTQEAINKITKNLNSLSELEVKNLQRLSGAMDELHN |
| | EILELDEKVDDLRADTISSQIELAVLLSNEGIINSEDEHLLALERKLKKMLGPSA |
| | VEIGNGCFETKHKCNQTCLDRIAAGTFDAGEFSLPTFDSLNITAASLNDDGLD |
| | NHTILLYY |

TABLE 7
Amino acid sequences of neuraminidase antigens that can
be included in a flu vaccine

| SEQ | |
|---|---|
| ID | Sequence |
| 88 | HSIQTRDQNHPETCNQSIITYENNTWVNQTYVNISNANIVAGQDATSMILAGN |
| | SSLCPISRWAIYSKDNSIRIGSKGDIFVIREPFISCSHLECRTFFLTQGALLNDKH |
| | SNGTVKDRSPYRTLMSCPIGEAPSPYNSRFESVAWSASACHDGMSWLTIGISG |
| | PDNGAVAVLKYNGIITDTIKSWRNKILRTQESECACVNGSCFTIMTDGPSNGQ |
| | ASYKIFKIEKGRIIKSIELNAPNYHYEECSCYPDTSKVMCVCRDNWHGSNRPW |
| | VSFDQNLDYQIGYICSGVFGDNPRSNDGTGSCGPVSSNGANGVKGFSFRYGN |
| | GVWIGRTKSISSRSGFEMIWDPNGWTETDSSFSVKQDIVAITDWSGYSGSFVQ |
| | HPELTGLDCIRPCFWVELIRGQPKENTIWTSGSSISFCGVNSDTVGWSWPDGA |
| | ELPFTIDK |
| 89 | HSIQTGSQNHTGICNQNIITYKNSTWVNQTYVNISNTNVVAGQDTTSVILTGNS |
| | SLCPIRGWAIYSKDNSIRIGSKGDVFVIREPFISCSHLECRTFFLTQGALLNDRH |
| | SNGTVKDRSPYRALMSCPVGEAPSPYNSRFESVAWSASACHDGMGWLTIGIS |
| | GPDNGAVAVLKYNGIITETIKSWRKKILRTQESECACVNGSCFTIMTDGPSNG |
| | LASYKIFKIEKGKVTKSIELNAPNSHYEECSCYPDTGKVMCVCRDNWHGSNR |
| | PWVSFDQNLDYQIGYICSGVFGDNPRPKDGTGSCGPVYVDGANGVKGFSYR |
| | YGNGVWIGRTKSNSSRHGFEMIWDPNGWTETDSKFSVRQDVVAMTDWSGY |
| | SGSFVQHPELTGLDCMRPCFWVELIRGRPKENTIWTSGSSISFCGVNSDTVDW |
| | SWPDGAELPFTIDK |
| 90 | HSIQTGSQNHTGTCNQSIITYKNSTWVNQTYVNISNTNVVAGKDTTSVILAGN |
| | SSLCPIRGWAIYSKDNGVRIGSKGDVFV1REPFISCSHLECRTFFLTQGALLNDK |
| | HSNGTVKDRSPYRALMSCPVGEAPSPYNSRFESVAWSASACHDGMGWLTIGI |
| | SGPDDGAVAVLKYNGIITETIKSWRKEILRTQESECACVNGSCFTIMTDGPSGG |
| | PASYKIFKIEKGKVTKSIELDAPNSHYEECSCYPDTGKVMCVCRDNWHGSNR |
| | PWVSFDQNLDYQMGYICSGVFGDNPRPKDGKGNCGPVYVDGANGVKGFSY |
| | RYGNGVWIGRTKSNSSRQGFEMIWDPNGWTETDSNFFVKQDVVAVTDWSG |
| | YSGSFVQHPELTGLDCMRPCFWVELIRGRPKEKTIWTSGSSISFCGVNSDTVD |
| | WSWPDGAELPFTIDK |
| 91 | HSIQTGSQNHTGICNQRIITYENSTWVNQTYVNINNTNVVAGKDTTSVTLAGN |
| | SSLCPVRGWAIYSKDNSIRIGSKGDVFVIREPFISCSHLECRTFFLTQGALLNDK |
| | HSNGTVKDRSPYRALMSCPIGEAPSPYNSRFESVAWSASACHDGMGWLTIGIS |
| | GPDDGAVAVLKYNGIITETIKSWRKRILRTQESECVCINGSCFTIMTDGPSNGP |
| | ASYRIFKIEKGKITKSIELDAPNSHYEECSCYPDTGTVMCVCRDNWHGSNRPW |
| | VSFNQNLDYQIGYICSGVFGDNPRPKDGKGSCGPVTVDGADGVKGFSYRYGN |
| | GVWIGRTKSNSSRKGFEMIWDPNGWTDTDSNFLVKQDVVAMTDWSGYSGSF |
| | VQHPELTGLDCMRPCFWVELIRGRPREKTTIWTSGSSISFCGVNSDTVNWSWP |
| | DGAELPFTIDK |
| 92 | HSIQIGTQNQPETCNQSVITYENNTWVNQTYVNISNTNFVAEQTVVSVKLAGN |
| | SSLCPVSGWAIYSKDNSVRIGSKGDVFVIREPFISCSHLECRTFFLTQGALLND |
| | KHSNGTIKDRSPYRTLMSCPVGEVPSPYNSRFESVAWSASACHDGTSWLTIGI |
| | SGPDNGAVAVLKYNGIITDTIKSWRNNILRTQESECACVNGSCFTVMTDGPSN |
| | GQASYKIFKIERGKVVKSVELNAPNYHYEECSCYPDSGEITCVCRDNWHGSN |
| | RPWVSFNQNLEYKIGYICSGIFGDNPRPNDRTGSCGPVFSNGANGVKGFSFKY |
| | GNGVWIGRTKSTSSRSGFEMIWDPNGWTGTDNNFSVKQDIVGITDWSGYSGS |
| | FVQHPELTGLDCMRPCFWVELIRGRPKENTIWTSGSSISFCGVTSDTVGWSWP |
| | DGAELPFTIDK |
| 93 | HSIQTGSQNHTGICNQRIITYENSTWVNHTYVNINNTNVVAGKDKTSVTLAGN |
| | SSLCSISGWAIYTKDNSIRIGSKGDVFVIREPFISCSHLECRTFFLTQGALLNDK |
| | HSNGTVKDRSPYRALMSCPLGEAPSPYNSKFESVAWSASACHDGMGWLTIGI |
| | SGPDNGAVAVLKYNGIITETIKSWKKRILRTQESECVCVNGSCFTIMTDGPSNG |
| | AASYKIFKIEKGKVTKSIELNAPNSHYEECSCYPDTGTVMCVCRDNWHGSNR |
| | PWVSFNQNLDYQIGYICSGVFGDNPRPKDGEGSCNPVTVDGADGVKGFSYRY |
| | GNGVWIGRTKSNRLRKGFEMIWDPNGWTDTDSDFSVKQDVVAMTDWSGYS |
| | GSFVQHPELTGLDCIRPCFWVELVRGRPRENTTIWTSGSSISFCGVNSDTANW |
| | SWPDGAELPFTIDK |
| 94 | HSIQTGSQNHTGICNQRIITYENSTWVNQTYVNINNTNVVAGKDKTSMTLAG |
| | NSSLCPIRGWAIYTKDNSIRIGSKGDVFVIREPFISCSHLECRTFFLTQGALLND |
| | KHSNGTVKNRSPYRALMSCPLGEAPSPYNSRFESVAWSASACHDGLGWLTIG |
| | ISGPDNGAVAVLKYNGIITETIKSWKKRILRTQESECVCMNGSCFTIMTDGPSD |
| | GAASYRIFKIEKGRVIKSIELDAPNYHYEECSCYPDTGTVMCVCRDNWHGSNR |
| | PWVSFNQNLDYQIGYICSGVLGDNPRPKDGEGSCNPVTADGADGVKGFSYRY |
| | GNGVWIGRTKSNRLRKGFEMIWDPNGWTDTDSDFSMKQDIVAMTDWSGYS |
| | GSFVQHPELTGLDCMRPCFWVELVRGLPRENTTIWTSGSSISFCGVNSDTANW |
| | SWPDGAELPFTIDK |
| 95 | HSIQTGSQNHTGVCNQRIITYENSTWVNHTYVNINNTNVIVGKDKTSVTLAGN |
| | SSLCSISGWAIYTKDNSIRIGSKGDVFVIREPFISCSHLECRTFFLTQGALLNDK |
| | HSNGTVKDRSPYRALMSCPLGEAPSPYNSKFESVAWSASACHDGMGWLTIGI |
| | SGPDNGAVAVLKYNGIITETIKSWKKQILRTQESECVCVNGSCFTIMTDGPSN |
| | GAASYKIFKIEKGKITKSIELNAPNFHYEECSCYPDTGTVMCVCRDNWHGSNR |
| | PWVSFNQNLDYQIGYICSGVFGDNPRPKDGEGSCNPVTVDGANGVKGFSYKY |
| | GNGVWIGRTKSNRLRKGFEMVWDPNGWTDTDSDFSVKQDVVAITDWSGYS |
| | GSFVQHPELTGLNCIRPCFWVELVRGLPKENTTIWTSGSSISFCGVNSDTANWS |
| | WPDGAELPFTIDK |
| 96 | HSIQTGWKNHTETCIQNVITYENNTWVNQTYVNISNTKTVTGQGVASTMVAG |
| | NSSLCPINGWAVYSKDNSIRIGSKGDIFVIREPFISCSNLECRTFFLTQGALLND |
| | RHSNGTVKDRSPYRTLMSCPIGEAPSPYNSRFESVAWSASACHDGVGWLTIGI |
| | SGPDNGAVAVLKYNGIITDTIKSWRNKILRTQESECVC1NGSCFTIMTDGPSNE |
| | QASYKVFKIEKGKIIKTIELDAPNYHYEECSCYPDTSKVMCVCRDNWHASNRP |
| | WVSFDQNLNYQIGYICSGVFGDNPRSNDGKGSCGPVPSSGANGVKGFSFRYG |
| | SGVWIGRTKSISSRSGFEMIWDPNGWTETDSSFSMKQDIIALTDWSGYSGSFV |
| | QHPELTGMDCIRPCFWVELIRGQPKESTIWTSGSSISFCGVNSETASWSWPDG |
| | ADLPFTIDK |
| 97 | HSIQTGSQNSTGICNQRIITYENSTWVNHTYVNINNTNVVAGEDKTSVTLVGN |
| | SSLCSISGWAIYTKDNSIRIGSKGDVFVIREPFISCSHLECRTFFLTQGALLNDK |
| | HSNGTVKDRSPYRALMSCPLGEAPSPYNSKFESVAWSASACHDGMGWLTIGI |
| | SGPDNGAVAVLKYNGIITGTIKSWKKQILRTQESECVCMNGSCFTIMTDGPSN |
| | KAASYKIFKIEKGKVTKSIELNAPNFYYEECSCYPDTGIVMCVCRDNWHGSNR |
| | PWVSFNQNLDYQIGYICSGVFGDNPRPEDGEGSCNPVTVDGANGVKGFSYKY |
| | GNGVWIGRTKSNRLRKGFEMIWDPNGWTNTDSDFSVKQDVVAITDWSGYSG |
| | SFVQHPELTGLDCIRPCFWVELVRGLPRENTTIWTSGSSISFCGVNSDTANWS |
| | WPDGAELPFTIDK |
| 98 | HSIQTESQNKPEICNQNVITYENNTWVNQTYVTVSNTNFVAEQAVASVKLVG |
| | NSSLCPVSGWAIYSKDNSVRIGSKGDVFVIREPFISCSHLECRTFFLTQGALLN |
| | DKHSNGTIKDRSPYRTLMSCPIGEVPSPYNSRFESVAWSASACHDGTSWLTIGI |
| | SGPDNGAVAVLKYNGIITDTIKSWRKNILRTQESECACVNGSCFTIMTDGPSN |
| | GQASYKVFKIERGKVVKSVELNAPNYHYEECSCYPESSEITCVCRDNWHGSN |
| | RPWVSFNQNLEYQMGYICSGIFGDNPRPNDKTGSCGPVFSNGANGVKGFSFR |
| | YGNGVWIGRTKSTSSRMGFEMIWDPDGWIRTDDKFSVKQDIIGITDWSGYSG |
| | SFVQHPELTGLDCMRPCFWVELIRGRPKENTIWTSGSSISFCGVNSDTVGWSW |
| | PDGAELPFTIDK |
| 99 | HSIQTGGKNYSEMCNQNVITYVNNTWVNRTYVNISNTNVATVQGVNSIILSG |
| | NSSLCPVSGWAIYSKDNGIRIGSKGDIFVIREPFISCSHLECRTFFLTQGALLND |
| | KHSNGTVKDRSPYRTLMSCPIGEAPSPYNSRFESVAWSASACHDGMGWLTIGI |
| | SGPDNGAVAVLKYNGIITDTIKSWRNKILRTQESECVCMNGSCFTVLTDGPSD |
| | GQASYKILKVEKGKIIKSIELNAPNYHYEECSCYPDAGKVMCVCRDNWHASN |
| | RPWVSFDQNLDYQIGYICSGVFGDNPRSNDGKGKCGPVFPNGANGVKGFSFK |
| | YGNGIWIGRTKSINSRRGFEMIWDPNGWTETDSSFSMKQDVIALTDWSGYSG |
| | SFVQHPELTGMNCIRPCFWVELIRGQPKEGTIWTSGSSISFCGVNSETTSWSWP |
| | DGADLPFTIDK |
| 100 | HSIQIGSQSQIETCNQSVITYENNTWVNQTYVNISNTNFAAGQSVVSVKLAGN |
| | SSLCPVSGWAIYSKDNSVRIGSKGDVFVIREPFISCSPFECRTFFLTQGALLNDK |
| | HSNGTIKDRSPYRTLMSCPIGEVPSPYNSRFESVAWSASACHDGINWLTIGISG |
| | PDSGAVAVLKYNGIITDTIKSWRNNILRTQESECACVNGSCFTIMTDGPSDGQ |
| | ASYKIFRIEKGKIIKSVEMKAPNYHYEECSCYPDSSEITCVCRDNWHGSNRPW |
| | VSFNQNLEYQMGYICSGVFGDNPRPNDKTGSCGPVSSNGANGVKGFSFKYGN |
| | GVWIGRTKSISSRKGFEMIWDPNGWTGTDNKFSIKQDIVGINEWSGYSGSFVQ |
| | HPELTGLDCIRPCFWVELIRGRPEENTIWTSGSSISFCGVNSDTAGWSWPDGAE |
| | LPFTIDK |
| 101 | HSIQLGSQNYTKTCTQSVITYENNTWVNQTYVNISNTNLAVGQSVVSAKLAG |
| | NSSLCPVSGWAIYSKDNSIRIGSKGDVFVIREPFISCSPLECRTFFLTQGALLND |
| | QHSNGTIKDRSPYRTLMSCPIGEVPSPYNSRFESVAWSASACHDGINWLTIGIS |
| | GPDNGAVAVLKYNGIITDTIKSWRNNILRTQESECVCVNGSCFTVMTDGPSNG |
| | QASYKIFRIEKGKIVKSVEMNAPNYHYEECSCYPDSSEITCVCRDNWHGSNRP |
| | WVSFNQNLEYQIGYICSGIFGDNPRPNDKTGSCGPVSSNGANGVKGFSFKYGN |
| | GVWIGRTKSISSRKGFEMIWDPNGWTGTDNNFSIKQDIVGINEWSGYSGSFVQ |
| | HPELTGLDCIRPCFWVELIRGRPKENTVWTSGSSISFCGVNSDTVGWSWPDGA |
| | ELPFTIDK |
| 102 | HFKQYECDSPASNQVMPCEPIIIERNITEIVYLNNTTIEKEICPKVVEYRNWSKP |
| | QCQITGFAPFSKDNSIRLSAGGDIWVTREPYVSCDHGKCYQFALGQGTTLDNK |
| | HSNDTIHDRIPHRTLLMNELGVPFHLGTRQVCIAWSSSSCHDGKAWLHVCITG |
| | DDKNATASFIYDGRLVDSIGSWSQNILRTQESECVCINGTCTVVMTDGSASGR |
| | ADTRILFIEEGKIVHISPLSGSAQHVEECSCYPRYPGVRCICRDNWKGSNRPVV |
| | DINMEDYSIDSSYVCSGLVGDTPRNDDRSSNSNCKNPNNERGNQGVKGWAF |
| | DNGDDVWMGRTISKDLRSGYETFKVIGGWSTPNSKSQINRQVIVDSDNRSGY |
| | SGIFSVEGKSCINRCFYVELIRGRKQETRVWWTSNSIVVFCGTSGTYGTGSWP |
| | DGANINFMPI |
| 103 | HFKQHECDSPSSNQVMLCEPIIIERNITEIVYLNNTTIEKETCPKLVEYRNWSKP |
| | QCKITGFAPFSKDNSIRLSAGGDIWVTREPYVSCDPGKCYQFALGQGTTLDNK |
| | HSNDTIHDRIPHRTLLMNELGVPFHLGTRQVCIAWSSSSCHDGKAWLHVCVT |
| | GDDKNATASFIYDGRLVDSIGSWSQNILRTQESECVCINGTCTVVMTDGSASG |
| | RADTRILFIEEGKIVHISPLSGSAQHVEECSCYPRYPDVRCICRDNWKGSNRPIV |
| | DINMKDYSIDSSYVCSGLVGDTPRNDDRSSKSNCRNPNNERGNHGVKGWAF |
| | DNGNDVWMGRTISKDLRSGYETFKVIGGWSTPNSKSQINRQVIVDSDNRSGY |
| | SGIFSVEGKSCINRCFYVELIRGREQETRVWWTSNSIVVFCGTSGTYGTGSWP |
| | DGANINFMPI |
| 104 | HFKQYECDSPANNQVMPCEPIIIERNITEIVYLTNTTIEKEICPKLVEYRNWSKP |
| | QCKITGFAPFSKDNSIRLSAGGDIWVTREPYVSCDPGKCYQFALGQGTTLDNK |
| | HSNDTIHDRIPHRTLLMNELGVPFHLGTRQVCIAWSSSSCHDGKAWLHVCVT |
| | GDDENATASFIYDGRLVDSIGSWSQNILRTQESECVCINGTCTVVMTDGSASG |
| | RADTRILFIEEGKIVHISPLSGSAQHVEECSCYPRYPGVRCICRDNWKGSNRPV |
| | VDINVKDYSIDSRYVCSGLVGDTPRNNDKSSNSNCRNPNNDKGNHGVKGWA |
| | FDDGNDVWMGRTISKDSRSGYETFKVIGGWSTPNSKSQINRQVIVDSDNRSG |
| | YSGIFSVEGKSCINRCFYVELIRGREQETKVWWTSNSIVVFCGTSGTYGTGSW |
| | PDGADINLMSI |
| 105 | HFKQYECDSPANNQVMPCEPIIIERNITKIMYLTNTTIEKEICPKSVEYRNWSKP |
| | QCKITGFAPFSKDNSIRLSAGGAIWVTREPYVSCDPGKCYQFALGQGTTLDNK |
| | HSNDTIHDRTPHRTLLMNELGVPFHLGTRQVCIAWSSSSCHDGKAWLHVCVT |
| | GYDKNATASFIYDGRLVDSIGSWSQNILRTQESECVCINGTCTVVMTDGSASG |
| | KADTKILFIEEGKIVHVSPLSGSAQHVEECSCYPRYPGVRCICRDNWKGSNRPI |
| | VDINVKDYSIDSSYVCSGLVGDTPRNNDRSSNSYCRNPNNERGNHGVKGWAF |
| | DDGDDVWMGRTISKDSRLGYETFKVIGGWSTPNSKLQINKQVIVDSDNRSGY |
| | SGIFSVEGKSCINRCFYVELIRGRRQETRVWWTSNSIVVFCGTSGTYGTGSWP |
| | DGADINLMPI |
| 106 | HFKQYECNSPPNNQVMLCEPTIIERNITEIVYLTNTTIEKEKCPKLVEYRNWSK |
| | PQCKITGFAPFSKDNSIRLSAGGDIWVTREPYVSCDPGKCYQFALGQGTTLNN |
| | RHSNDTVHDRTPYRTLLMNELGVPFHLGTKQVCIAWSSSSCHDGKAWLHVC |
| | VTGHDENATASFIYDGRLVDSIGSWSKNILRTQESECVCINGTCTVVMTDGSA |
| | SERADTKILFIEEGKIVHISPLSGSAQHVEECSCYPRYPGVRCVCRDNWKGSNR |
| | PIVDINVKDYSIVSSYVCSGLVGDTPRKNDSSSSSYCRNPNNEKGSHGVKGWA |
| | FDDGNDVWMGRTISEELRSGYETFKVIGGWSTPNSKLQINRQVIVDRGNRSG |
| | YSGIFSVEGKSCINRCFYVELIRGRKQENKVWWTSNSIVVFCGTSGTYGTGSW |
| | PDGADINLMPI |
| 107 | HFKQYECNSPPNNQVMLCEPTIIERNITEIVYLTNTTIEKEICPKLAEYRNWSKP |
| | QCNITGFAPFSKDNSIRLSAGGDIWVTREPYVSCDPDKCYQFALGQGTTLNNG |
| | HSNDTVHDRTPYRTLLMNELGVPFHLGTKQVCIAWSSSSCHDGKAWLHVCV |
| | TGDDENATASFIYNGRLVDSIGSWSKKILRTQESECVCINGTCTVVMTDGSAS |
| | GKADTKILFIEEGKIVHTSPLSGSAQHVEECSCYPRYPGVRCVCRDNWKGSNR |
| | PIVDINVKDYSIVSSYVCSGLVGDTPRKNDSSSSSHCLNPNNEEGGHGVKGWA |
| | FDDGNDVWMGRTISEKLRSGYETFKVIEGWSKPNSKLQINRQVIVDRGNRSG |
| | YSGIFSVEGKSCINRCFYVELIRGRKQETEVLWTSNSIVVFCGTSGTYGTGSWP |
| | DGADINLMPI |
| 108 | HFKQYECNSPPNNQVILCEPTIIERNITEIVYLTNTT1EKEICPKLAEYRNWSKPQ |
| | CKITGFAPFSKDNSIRLSAGGDIWVTREPYVSCDPDKCYQFALGQGTTLNNRH |
| | SNDTVHDRTPYRTLLMNELGVPFHLGTKQVCIAWSSSSCHDGKAWLHVCVT |
| | GHDENATASFIYNGRLVDSIGSWSKKILRTQESECVCVNGTCTVVMTDGSAS |
| | GRADTKILFIEEGQIVHISPLLGSAQHVEECSCYPRYPGVRCVCRDNWKGSNR |
| | PIVDINVKDYSIVSSYVCSGLVGDTPRKNDRSSSSNCLNPNNEEGGHGVKGW |
| | AFDDGNDVWMGRTISEKLRSGYETFKVIEGWSKPNSKLQINRQVIVDRDDRS |
| | GYSGIFSVEGKSCINRCFYVELIRGRKQETEVWWTSNSIVVFCGTPGTYGTGS |
| | WPDGADINLMPI |
| 109 | HFKQYEFNSPPNNQVMLCEPTIIERNITEIVYLTNTTIEKEICPKLAEYRNWSKP |
| | QCDITGFAPFSKDNSIRLSAGGDIWVTREPYVSCDPDRCYQFALGQGTTLNNV |
| | HSNDTVHDRTPYRTLLMNELGVPFHLGTKQVCIAWSSSSCHDGKAWLHVCV |
| | TGDDKNATASFIYNGRLVDSIVSWSKKILRTQESECVCINGTCTVVMTDGSAS |
| | GKADTKILFIEEGKIVHTSTLSGSAQHVEECSCYPRYPGVRCVCRDNWKGSNR |
| | PIVDINIKDYSIVSSYVCSGLVGDTPRKNDSSSSSHCLDPNNEEGGHGVKGWA |
| | FDDGNDVWMGRTISEKLRSGYETFKVIEGWSNPNSKLQINRQVIVDRGNRSG |
| | YSGIFSVEGKSCINRCFYVELIRGRKEETEVLWTSNSIVVFCGTSGTYGTGSWP |
| | DGADINLMPI |
| 110 | HFKQYECDPPANNQVMTCKPIIIERNTTEIVYLTNVTIEKETYPKIVEYRNWSM |
| | PQCKITGFAPFSKDNSIRLSAGGDIWVTREPYVSCEPGKCYQFALGQGTTLDN |
| | KHSNDTIHDRTPHRTLLMNELGVPFYLGTRQVCIAWSSSSCYDGKAWLHVCI |
| | TGHDKNATASFIYDGRLVDSIGSWSMNILRTQESECVCINGTCTVVMTDGSAS |
| | GKADTRILFIEEGKIIHISPLAGSAQHVEECSCYPRYPGVRCICRDNWKGSNRPI |
| | VDINVKDYSIDSSYVCSGLVGDTPRNNDKSSSSYCRNPNNEKGGHGVKGWAF |
| | DDGNDLWMGRTISEDIRSGYETFKVIGGWSIPNSKLQVNRQVIVDSNNRSGYS |
| | GIFSVEGKSCINRCFYVELIRGRRTEARVGWTSNSIVVFCGTSGTYGTGTWPD |
| | GADINLMPI |
| 111 | HFKQYECSSPSTNQVRLCEPTIIERNITEIVYLTNTTIEKEICPKLAEYRDWSKPQ |
| | CKIKGFAPFSKDNSIRLSAGGDIWVTREPYVSCDPDKCYQFALGQGTTLNNRH |
| | SNDTVHDRTPYRTLLMNELGVPFHLGTKQVCTAWSSSSCHDGKAWLHVCVT |
| | GHDENATASFIYNGRLVDSIGSWSKKILRTQESECVCINGTCTVVMTDGSASG |
| | RADTKILFIEEGKIVHISQLSGSAQHVEECSCYPRYPGVRCVCRDNWKGSNRPI |
| | VDINVKDRSIASSYVCSGLVGDTPRKNDSSSSSHCLTPNNEEGGHGVKGWAF |
| | DDGNDVWMGRTISEKLRLGYETFKVIEGWSKPNSKLQINRQVIVDKGNRSGY |
| | SGIFSVEGKSCINRCFYVELIRGRKQETEVWWTSNSIVVFCGTSGTYGTGSWP |
| | DGADINLMPI |
| 112 | HFRQCECNSSAINQTMPCEPTKIEKNITEIVYLTNTTIKTEVCPKLVKYRNWAK |
| | PQCKITGFAPFSKDNSIRLSAGGAIWVTREPYVSCDLSKCYQFALGQGTTLDN |
| | RHSNDTIHDRTPYRTLLMNELGVPFHLGTRQVCIAWSSSSCHDGKAWLHVCV |
| | TGYDKNATASLIYDGRLVDSIGSWSQNILRTQESECVCINGTCTVVMTDGSAS |
| | GKADTRILFVEEGKIIHISPLTGSAQHVEECSCYPRYPGVRCVCRDNWKGSNR |
| | PVVDINVKDYKINSSYVCSGLVGNTPRNNDRSSNSNCQNPNNQRGNHGVKG |
| | WAFDDGNDIWMGRTISNDSRLGYETFKVIGGWSKPNSKVQTNRQVIVDSDNR |
| | SGYSGVFSVEGKSCINRCFYVELIRGRRQETRVWWTSNSIVVFCGTSGTYGSG |
| | SWPDGADINLMPI |
| 113 | HFNQCDCHYPPNNQVTLCEPTITERNTTKIVYLTNTTIEKENCPKLAEYRDWS |
| | KPQCKITGFAPFSKDNSIRLSAGGDIWVTREPYVSCDPDKCYQFALGQGTTLN |
| | NRHSNDTFHDRTPYRTLLMNELGIPFHLGTKQVCIAWSSSSCHDGKAWLHVC |
| | ITGHDENATASITYNGRLVDSIGSWSKKILRTQESECVCINGTCTVVMTDGSAS |
| | GRADTKILFIEEGKIIHISPLIGSAQHVEECSCYPRYPGVRCICRDNWKGSNRPV |
| | VDINVKDYSIVSSYVCSGLVGDTPRKDDKSSSSNCLNPNNEKGEHGVKGWAF |
| | DDGKDVWMGRTINETLRSGYETFKVIEGWSKSNSKLQINRQVIVEKSDRSGY |
| | SGIFSVEGKSCINRCFYVELIRGRKQETAVWWTSNSIVVFCGTSGTYGTGSWP |
| | DGADINLMPV |
| 114 | HFEQYDCNPFPNNQVMLCKPTIIERNTTEFVYLTNTTIEKEICPKLAEYRNWAK |
| | PQCTITGFAPFSRDNSIRLSAGGDIWVTREPYVSCDPDKCYQFALGQGTTLNN |
| | GHSNDTVHDRTPYRTLLMNELGVPFHLGTRQVCTAWSSSSCHDGKAWLHVCI |
| | TGDDKNATASFIYGGKLVDSIGSWSKNILRTQESECVCINGTCTVVMTDGSAS |
| | GKADTKILFIKEGKIVHISTLSGSAQHVEECSCYPRYPGVRCVCRDNWKGSNR |
| | PVVDINVKDYSIASSYVCSGLVGDTPRKNDSFSNSHCLNPNNEEGGHGVKGW |
| | AFDDGSDVWMGRTISEKFRLGYETFKVIEGWSRPNSKLQTNRQVIVERGNRS |
| | GYSGIFSVEGKSCINRCFYVELIRGRKEETKVWWTSNSIVVFCGTSGTYGTGS |
| | WPDGADINIMPI |
| 115 | HLRQYEFNSPPKNNQVMLCEPTIIERNITEIVYLTNTTIEKEICPKLAEYRNWSK |
| | PQCDITGFAPFSKDNSIRLSAGGDIWVTREPYVSCGPDKCFQFALGQGTTLNN |
| | VHSNDTVHDRTPYRTLLMSELGVPFHLGTKQVCIAWSSSSCHDGKAWLHVC |
| | VTGDDKNATASIIYNGRLVDSIVSWSKKILRTQESECVCINGICTVVMTDGSAS |
| | GKADTKILFIEEGKIVHTSTLSGSAQHVEECSCYPRYPGVRCVCRDNWKGSNR |
| | PIVDINIRDYSIVSNYVCSGLVGDTPRKPDSSSSSNCLDPNDEEGGHGVKGWA |
| | FDDGNDVWMGRTISEKSRLGYETFKVIGGWFNPNSKSQINRQVIVDRGNRSG |
| | YSGIFSVEGKNCINRCFYVELIRGRKDEIEVLWTSNSIVVFCGTSGTYGTGSWP |
| | DGADLKLMSV |
| 116 | LYSDILLKFSPTEITAPTMPLGCANASNVQAVNRSATKGVTLLLPEPEWTYPRL |
| | SCPGSTFQKALLISPHRFGETKGNSAPLIIREPFIACGPNECKHFALTHYAAQPG |
| | GYYNGTRGDRNKLRHLISVKLGKIPTVENSIFHMAAWSGSACHDGKEWTYIG |
| | VDGPDNNALLKVKYGEAYTDTYHSYANKILRTQESACNCIGGNCYLMITDGS |
| | ASGVSECRFLKIREGRIIKEIFPTGRVKHTEECTCGFASNKTIECACRDNRYTAK |
| | RPFVKLNVEADTAEIRLMCTDTYLDTPRPNDGSITGPCESDGDKGSGGIKGGF |
| | VHQRMKSKIGRWYSRTMSKTERMGMGLYVKYDGDPWADSDALAFSGVMV |
| | SMKEPGWYSFGFEIKDKKCDVPCIGIEMVHDGGKETWHSAATAIYCLMGSGQ |
| | LLWDTVTGVDMAL |
| 117 | LYSDVLLKFSSTKTTAPTMSLECTNASNAQTVNHSATKEMTFPPPEPEWTYPR |
| | LSCQGSTFQKALLISPHRFGEIKGNSAPLIIREPFVACGPKECRHFALTHYAAQP |
| | GGYYNGTRKDRNKLRHLVSVKLGKIPTVENSIFHMAAWSGSACHDGREWTY |
| | IGVDGPDNDALVKIKYGEAYTDTYHSYAHNILRTQESACNCIGGDCYLMITD |
| | GSASGISKCRFLKIREGRIIKEILPTGRVEHTEECTCGFASNKTIECACRDNSYT |
| | AKRPFVKLNVETDTAEIRLMCTKTYLDTPRPDDGSIAGPCESNGDKWLGGIKG |
| | GFVHQRMASKIGRWYSRTMSKTNRMGMELYVKYDGDPWTDSDALTLSGVM |
| | VSIEEPGWYSFGFEIKDKKCDVPCIGIEMVHDGGKDTWHSAATAIYCLMGSG |
| | QLLWDTVTGVDMAL |
| 118 | LYSDILLKFSPTKRTAPTMSLECVNVSNAQAVNHSATKEMTFLLPEPEWTYPR |
| | LSCQGSTFQKALLISPHRFGETRGNSAPLIIREPFVACGPKECRHFALTHYAAQ |
| | PGGYYNGTRKDRNKLRHLISVKLGKIPTVENSIFHMAAWSGSACHDGREWTY |
| | IGVDGPDSDALIKIKYGEAYTDTYHSYAHNILRTQESACNCIGGDCYLMITDG |
| | SASGISKCRFLKIREGRIIKEIFPAGRVEHTEECTCGFASNKTIECACRDNSYTA |
| | KRPFVKLNVETDTAEIRLMCTETYLDTPRPDDGSITGPCESNGDKGLGGIKGG |
| | FVHQRMASKIGRWYSRTMSKTERMGMELYVKYDGDPWTDSDALAPSGVMV |
| | SIKEPGWYSFGFEIKDKKCDVPCIGIEMVHDGGKETWHSAATAIYCLMGSGQL |
| | LWDTVTGVDMAL |
| 119 | LYSDILLKFSPTKITAPTMSLDCANVSNVQAVNRSVTKEMTFLLPEPEWTYPR |
| | LSCQGSTFQKALLISPHRFGETRGNSAPLIIREPFVACGPKECRHFALTHYAAQ |
| | PGGYYNGTRNDRNKLRHLISVKLGKIPTVENSIFHMAAWSGSACHDGREWTY |
| | IGVDGPDSNALIKIKYGEAYTDTYHSYANNILRTQESACNCIGGDCYPMITDGS |
| | ASGISKCRFLKIREGRIIKEIFPTGRVDHTEECTCGFASNKTIECACRDNSYTAK |
| | RPFVKLNVETDTAEIRLMCTETYLDTPRPDDGSITGPCESNGDKGLGGIKGGF |
| | VHQRMASKTGRWYSRTMSKTERMGMELYVRYDGDPWTDSDALAPSGVMV |
| | SMKEPGWYSFGFEIKDKKCDVPCIGIEVVQVGGKETWHSAATAIYCLMGSGQ |
| | LLWDIVTGVAMAL |
| 120 | LYSDILLKFSPTEKSAPTMSLDCANASNVQAVNRSATKGMTLLLPEPEWTYPR |
| | LSCQGSTFQKALLISPHRFGETRGNSAPLIIREPFIACGPKECKHFALTHYAAQP |
| | GGYYNGTREDRNKLRHLISVKLGKIPTVENSIFHMAAWSGSACHDGREWTYI |
| | GVDGPDSNALIKIKYGEAYTDTYHSYANNILRTQESACNCIGGDCYLMITDGS |
| | ASGISKCRFLKIREGRIIKEIFPTGRVDHTEECTCGFASNKTIECACRDNSYTAK |
| | RPFVKLNVETDTAEIRLMCTETYLDTPRPDDGSKTGPCESNGDKGSGGIKGGF |
| | VHQRMASKIGRWYSRTMSKTERMGMELYVKYDGDPWTDSDALAPSGVMVS |
| | MEEPGWYSFGFEIKDKKCDVPCIGIEMVHDGGKNTWHSAATAIYCLMGSGQL |
| | LWDTVTGVDMAL |
| 121 | LYSDILLKFSPTKVIAPTVSLDCANASNVQAVNHSATKEMTFLLPEPEWTYPR |
| | LSCQGSTFQKALLISPHRFGEAKGNSAPLIIREPFIACGPKECKHFALTHYAAKP |
| | GGYYNGTREDRNKLRHLISVNLGKIPTVENSIFHMAAWSGSACHDGREWTYI |
| | GVDGPDSNALIKIKYGEAYTDTYHSYANNILRTQESACNCIGGDCYLMITDGS |
| | ASGISRCRFLKIREGRIIKEIFPTGRVEHTEECTCGFASNKTIECACRDNSYTAK |
| | RPFVKLNVETDTAEIRLMCTETYLDTPRPDDGSITGPCESNGDKGNGGIKGGF |
| | VHQRMASRIGRWYSRTMSKTKRMGMELYVKYDGDPWTDSDALTPSGVMIS |
| | MEEPGWYSFGFEIKDKKCDVPCIGIEMVHDGGKKTWHSAATAIYCLMGSGQL |
| | LWDTVTGVDMAL |
| 122 | LYSDILLKFSSTEITAPTMPLNCANASNVQAVNHSATKGVTLPLPEPEWTYPRL |
| | SCPGSTFQKALLISPHRFGETKGNSAPLIIREPFIACGPKECKHFALTHYAAQPG |
| | GYYNGTREDRNKLRHLISVKLGKIPTVENSIFHMAAWSGSACHDGREWTYIG |
| | VDGPDSNALLKIKYGEAYTDTYHSYANNILRTQESACNCIGGDCYLMITDGSA |
| | SGVSECRFLKIREGRIIKEIFPTGRVEHTEECTCGFASNKTIECACRDNSYTAKR |
| | PFVKLNVETDTAEIRLMCTETYLDTPRPDDGSITGPCESNGDKGSGGIKGGFV |
| | HQRMASKIGRWYSRTMSKNKRMGMGLYVKYDGDPWIDSDALTLSGVMVS |
| | MEEPGWYSFGFEIKDKKCDVPCIGIEMVHDGGKETWHSAATAIYCLMGSGQL |
| | LWDTVTGVNMAL |
| 123 | LYSDILLKFSTTEITAPTMPLDCANASNVQAVNHSAAKGVTLLLPEPEWTYPR |
| | LSCPGSTFQKALLISPHRFGETKGNSAPLIIREPFIACGPKECKHFALTHYAAQP |
| | GGYYNGTREDRNKLRHLISVKLGKIPTVENSIFHMAAWSGSACHDGKEWTYI |
| | GVDGPDSNALLKIKYGEAYTDTYHSYAHNILRTQESACNCIGGNCYLMITDGS |
| | ASGISECRFLKIREGRIIKEIFPTGRVKHTEECTCGFANNKTIECACRDNSYTAK |
| | RPFVKLNVETDTAEIRLMCTETYLDTPRPDDGSITGPCESNGNKGSGGIKGGF |
| | VHQRMASKIGRWYSRTMSKTKRMGMGLYVKYDGDPWTDSDALVFSGVMIS |
| | VEEPGWYSFGFEIKDKKCDVPCIGIEMVHDGGKETWHSAATAIYCLMGSGQL |
| | LWDTVTGVNMTL |
| 124 | LYSDILLKFSRTEITAPILRLACANASNVQAVNRSATKGVTLLLPEPEWTYPRL |
| | SCPGSTFQKALLISPHRFGETKGNSAPLIIREPFIACGPKECKHFALTHYAAQPG |
| | GYYNGTREDRNKLRHLISVKLGKIPTVENSIFHMAAWSGSACHDGREWTYIG |
| | VDGPDSNALLKIKYGGAFTDTYHSYAKNILSPQESACNCIGGDCYLMITDGPA |
| | SGISECRFLKIREGRIIKEIFPTGRVKHTEECTCGFASNKTIECACRDNSYTAKRP |
| | FVKLNVETDTAEIRLMCTETYLDTPRPNDGSITGPCESNGDKGSGGIKGGFVH |
| | QRMASKIGRWYSRTMSKTKRMGMGLYVKYDGDPWTDSEALALSGVMVSM |
| | EEPGWYSFGFEIKDKKCDVPCIGIEMVHDGGKTTWHSAATAIYCLMGSGQLL |
| | WDTVTGVNMTL |
| 125 | LYSDILLKFSRTEITAPIMPLDCANASNVQAVNRSATKGVTLLLPEPEWTYPRL |
| | SCPGSTFQKALLISPHRFGETKGNSAPLIIREPFIACGPKECKHFALTHYAAQPG |
| | GYYNGTREDRNKLRHLISVKLGKIPTVENSIFHMAAWSGSACHDGREWTYIG |
| | VDGPDSNALLKIKFGEAYTDTYHSYAKNILGTQESACNCIGGDCNLMITDGPA |
| | SGISESRFLKIGEGRIIKEIFPTGRVKHTEECTCGFASNKTIECACRDNSYTAKRP |
| | FVKLNVETDTAEIRLMCTETYLDTPRPNDGSITGPCESNGDKGSGGIKGGFVH |
| | QRMASKIGRWYSRTMSKTERMGMGLYVKYDGDPWADSDALAFSGVMVSM |
| | KEPGWYSFGFEIKDKKCDVPCIGIEMVHDGGKETWHSAATAIYCLMGSGQLL |
| | WDTVTGVNMAL |
| 126 | LYSDILLKFSPTEITAPTMPLDCANTSNVQAVNRSATKGVTLLLPEPEWTYPRL |
| | SCPGSTFQKALLISPHRFGETKGNSAPLIIREPFIACGPNECKHFALTHYAAQPG |
| | GYYNGTRGDRNKLRHLISVKLGKIPTVENSIFHMAAWSGSACHDGKEWTYIG |
| | VDGPDNNALLKITYGEAYPGTYHSYAIKNPRTQESAPNCFGGHSFPIITHAPPS |
| | GVWEPRFLKIREGRIINEIFPTGRVKPPEECTCGFASNNTIECACRDNNCTAKRP |
| | FVKFHVESDPAEIRAMCTDTYLDSPRPDDGSITGPCDSNGDKGSGGIKGGFVH |
| | QRMESKIGRWYSRTMSKTERMGMGLYVKYDGDPWADSDALANSGVMVSM |
| | NEPGSSSFGFEIKDKKCDVPCIGIEMVHDGGKETWHSAATAIYCLMGSGQLL |
| | WDTVTGVDMAL |
| 127 | LYSDILLKFSPTEITAPTMPLDCANASNVQAVNRSATKGVTLFLPEPEWTYPRL |
| | SCPGSTFQKALLISPHRFGETKGNSAPLIIREPFIACGPTECKHFALTHYAAQPG |
| | GYYNGTREDRNKLRHLISVKLGKIPTVENSIFHMAAWSGSACHDGKEWTYIG |
| | VDGPDSNALLKIKYGEAYTDTYHFYAKNILRTQESACSCIGGDCYLMITDGPA |
| | SGVSECRFLKIREGRIIKEIFPTGRVKHTEECTCGFASNKTIECACRDNSYTAKR |
| | PFVKLNVETDTAEIRLMCTETYLDTPRPNDGSITGPCESDGDKGSGGIKGGFV |
| | HQRMASKIGRWYSRTMSKTKRMGMGLYVKYDGDPWTDSEALALSGVMVS |
| | MEEPGWYSFGFEIKDKKCDVPCIGIEMVHDGGKTTWHSAATAIYCLMGSGQL |
| | LWDTVTGVDMAL |

TABLE 8
Amino Acid sequences of hemagglutinin antigens from Sino
Biologicals

| SEQ | Catalog | |
|---|---|---|
| ID | # | Sequence |
| 128 | 40016- | MKAIIVLLMVVTSNADRICTGITSSNSPHVVKTATQGEVNVTGVIP |
| | V08B | LTTTPTKSHFANLKGTETRGKLCPKCLNCTDLDVALGRPKCTGKIP |
| | | SARVSILHEVRPVTSGCFPIMHDRTKIRQLPNLLRGYEHIRLSTHNV |
| | | INAENAPGGPYKIGTSGSCPNITNGNGFFATMAWAVPKNDKNKTA |
| | | TNPLTIEVPYICTEGEDQITVWGFHSDNETQMAKLYGDSKPQKFTS |
| | | SANGVTTHYVSQIGGFPNQTEDGGLPQSGRIVVDYMVQKSGKTG |
| | | TITYQRGILLPQKVWCASGRSKVIKGSLPLIGEADCLHEKYGGLNK |
| | | SKPYYTGEHAKAIGNCPIWVKTPLKLANGTKYRPPAKLLKERGFF |
| | | GAIAGFLEGGWEGMIAGWHGYTSHGAHGVAVAADLKSTQEAIN |
| | | KITKNLNSLSELEVKNLQRLSGAMDELHNEILELDEKVDDLRADTI |
| | | SSQIELAVLLSNEGIINSEDEHLLALERKLKKMLGPSAVEIGNGCFE |
| | | TKHKCNQTCLDRIAAGTFDAGEFSLPTFDSLNITAASLNDDGLDN |
| | | HTILLYYSTAASSLAVTLMIAIFVVYMVSRDNVSCSICL |
| 129 | 11716- | MKAIIVLLMVVTSNADRICTGITSSNSPHVVKTATQGEVNVTGVIP |
| | V08B | LTTTPTKSHFANLKGTETRGKLCPKCLNCTDLDVALGRPKCTGNIP |
| | | SARVSILHEVRPVTSGCFPIMHDRTKIRQLPNLLRGYEHIRLSTHNV |
| | | INAENAPGGPYKIGTSGSCPNVTNGNGFFATMAWAVPKNDNNKT |
| | | ATNSLTIEVPYICTEGEDQITVWGFHSDNEIQMAKLYGDSKPQKFT |
| | | SSANGVTTHYVSQIGGFPNQTEDGGLPQSGRIVVDYMVQKSGKTG |
| | | TITYQRGILLPQKVWCASGRSKVIKGSLPLIGEADCLHEKYGGLNK |
| | | SKPYYTGEHAKAIGNCPIWVKTPLKLANGTKYRPPAKLLKERGFF |
| | | GAIAGFLEGGWEGMIAGWHGYTSHGAHGVAVAADLKSTQEAIN |
| | | KITKNLNSLSELEVKNLQRLSGAMDELHNEILELDEKVDDLRADTI |
| | | SSQIELAVLLSNEGIINSEDEHLLALERKLKKMLGPSAVEIGNGCFE |
| | | TKHKCNQTCLDRIAAGTFDAGEFSLPTFDSLNITAASLNDDGLDN |
| | | HTILLYYSTAASSLAVTLMIAIFVVYMVSRDNVSCSICL |
| 130 | 40157- | MKAIIVLLMVVTSNADRICTGITSSNSPHVVKTATQGEVNVTGVIP |
| | V08B | LTTTPTKSHFANLKGTKTRGKLCPNCLNCTDLDVALGRPMCMGTI |
| | | PSAKASILHEVRPVTSGCFPIMHDRTKIRQLPNLLRGYENIRLSTHN |
| | | VINAERAPGGPYRLGTSGSCPNVTSRNGFFATMAWAVPRDNKTA |
| | | TNPLTVEVPYICTKGEDQITVWGFHSDDKTQMKNLYGDSNPQKFT |
| | | SSANGVTTHYVSQIGDFPNQTEDGGLPQSGRIVVDYMVQKPGKTG |
| | | TIVYQRGVLLPQKVWCASGRSKVIKGSLPLIGEADCLHEKYGGLN |
| | | KSKPYYTGEHAKAIGNCPIWVKTPLKLANGTKYRPPAKLLKERGF |
| | | FGAIAGFLEGGWEGMIAGWHGYTSHGAHGVAVAADLKSTQEAIN |
| | | KITKNLNSLSELEVKNLQRLSGAMDELHNEILELDEKVDDLRADTI |
| | | SSQIELAVLLSNEGIINSEDEHLLALERKLKKMLGPSAVDIGNGCFE |
| | | TKHKCNQTCLDRIAAGTFNAGEFSLPTFDSLNITAASLNDDGLDN |
| | | HTILLYYSTAASSLAVTLMIAIFIVYMVSRDNVSCSIC |
| 131 | 40498- | MKAIIILLMVVTSNADRICTGITSSNSPHVVKTATQGEVNVTGVIPL |
| | V08B | TTTPTKSYFANLKGTKTRGKLCPDCLNCTDLDVALGRPMCVGTTP |
| | | SAKASILHEVRPVTSGCFPIMHDRTKIRQLANLLRGYENIRLSTQN |
| | | VIDAEKAPGGPYRLGTSGSCPNATSKSGFFATMAWAVPKDNNKN |
| | | ATNPLTVEVPYICAEGEDQITVWGFHSDNKTQMKNLYGDSNPQK |
| | | FTSSANGVTTHYVSQIGGFPDQTEDGGLPQSGRIVVDYMMQKPGK |
| | | TGTIVYQRGVLLPQKVWCASGRSKVIKGSLPLIGEADCLHEKYGG |
| | | LNKSKPYYTGEHAKAIGNCPIWVKTPLKLANGTKYRPPAKLLKER |
| | | GFFGAIAGFLEGGWEGMIAGWHGYTSHGAHGVAVAADLKSTQE |
| | | AINKITKNLNSLSELEVKNLQRLSGAMDELHNEILELDEKVDDLRA |
| | | DTISSQIELAVLLSNEGIINSEDEHLLALERKLKKMLGPSAVDIGNG |
| | | CFETKHKCNQTCLDRIAAGTFNAGEFSLPTFDSLNITAASLNDDGL |
| | | DNHTILLYYSTAASSLAVTLMLAIFIVYMVSRDNVSCSICL |
| 132 | 40463- | MKAIIVLLMVVTSNADRICTGITSSNSPHVVKTATQGEVNVTGVIP |
| | V08B | LTTTPTKSYFANLKGTRTRGKLCPDCLNCTDLDVALGRPMCVGTT |
| | | PSAKASILHEVRPVTSGCFPIMHDRTKIRQLPNLLRGYEKIRLSTQN |
| | | VIDAEKAPGGPYRLGTSGSCPNATSKIGFFATMAWAVPKDNYKN |
| | | ATNPLTVEVPYICTEGEDQITVWGFHSDNKTQMKSLYGDSNPQKF |
| | | TSSANGVTTHYVSQIGDFPDQTEDGGLPQSGRIVVDYMMQKPGK |
| | | TGTIVYQRGVLLPQKVWCASGRSKVIKGSLPLIGEADCLHEEYGG |
| | | LNKSKPYYTGKHAKAIGNCPIWVKTPLKLANGTKYRPPAKLLKER |
| | | GFFGAIAGFLEGGWEGMIAGWHGYTSHGAHGVAVAADLKSTQE |
| | | AINKITKNLNSLSELEVKNLQRLSGAMDELHNEILELDEKVDDLRA |
| | | DTISSQIELAVLLSNEGIINSEDEHLLALERKLKKMLGPSAVDIGNG |
| | | CFETKHKCNQTCLDRIAAGTFNAGEFSLPTFDSLNITAASLNDDGL |
| | | DNHTILLYYSTAASSLAVTLMLAIFIVYMVSRDNVSCSICL |
| 133 | 40323- | MELIVLLILLNPYTFVLGDRICIGYQANQNNQTVNTLLEQNVPVTG |
| | V08B | AQEILETNHNGKLCSLNGVPPLDLQSCTLAGWLLGNPNCDSLLEA |
| | | EEWSYIKINESAPDDLCFPGNFENLQDLLLEMSGVQNFTKVKLFNP |
| | | QSMTGVTTNNVDQTCPFEGKPSFYRNLNWIQGNSGLPFNIEIKNPT |
| | | SNPLLLLWGIHNTKDAAQQRNLYGNDYSYTIFNFGEKSEEFRPEIG |
| | | QRDEVKAHQDRIDYYWGSLPAQSTLRIESTGNLIAPEYGFYYKRK |
| | | EGKGGLMKSKLPISDCSTKCQTPLGALNSTLPFQNVHQQTIGNCPK |
| | | YVKATSLMLATGLRNNPQMEGRGLFGAIAGFIEGGWQGMIDGW |
| | | YGYHHENQEGSGYAADKEATQKAVDAITNKVNSIIDKMNSQFES |
| | | NIKEFNRLELRIQHLSDRVDDALLDIWSYNTELLVLLENERTLDFH |
| | | DANVKNLFEKVKAQLKDNAIDEGNGCFLLLHKCNNSCMDDIKNG |
| | | TYKYMDYREESHIEKQKIDGVKLTDYSRYYIMTLYSTIASSVVLGS |
| | | LIIAAFLWGCQKGSIQCKICI |
| 134 | 40324- | MITILILVLPIVVGDQICIGYHSNNSTQTVNTLLESNVPVTSSHSILE |
| | V08B | KEHNGLLCKLKGKAPLDLIDCSLPAWLMGNPKCDELLTASEWAY |
| | | IKEDPEPENGICFPGDFDSLEDLILLVSNTDHFRKEKIIDMTRFSDVT |
| | | TNNVDSACPYDTNGASFYRNLNWVQQNKGKQLIFHYQNSENNPL |
| | | LIIWGVHQTSNAAEQNTYYGSQTGSTTITIGEETNTYPLVISESSILN |
| | | GHSDRINYFWGVVNPNQNFSIVSTGNFIWPEYGYFFQKTTNISGIIK |
| | | SSEKISDCDTICQTKIGAINSTLPFQNIHQNAIGDCPKYVKAQELVL |
| | | ATGLRNNPIKETRGLFGAIAGFIEGGWQGLIDGWYGYHHQNSEGS |
| | | GYAADKEATQKAVDAITTKVNNIIDKMNTQFESTAKEFNKIEMRI |
| | | KHLSDRVDDGFLDVWSYNAELLVLLENERTLDFHDANVNNLYQ |
| | | KVKVQLKDNAIDMGNGCFKILHKCNNTCMDDIKNGTYNYYEYR |
| | | KESHLEKQKIDGVKLSENSSYKIMIIYSTVASSVVLGLIILAAIEWG |
| | | CFKGNLQCRICI |
| 135 | 11085- | MKAILVVLLYTFATANADTLCIGYHANNSTDTVDTVLEKNVTVT |
| | V08B | HSVNLLEDKHNGKLCKLRGVAPLHLGKCNIAGWILGNPECESLST |
| | | ASSWSYIVETPSSDNGTCYPGDFIDYEELREQLSSVSSFERFEIFPKT |
| | | SSWPNHDSNKGVTAACPHAGAKSFYKNLIWLVKKGNSYPKLSKS |
| | | YINDKGKEVLVLWGIHHPSTSADQQSLYQNADAYVFVGSSRYSK |
| | | KFKPEIAIRPKVRDREGRMNYYWTLVEPGDKITFEATGNLVVPRY |
| | | AFAMERNAGSGIIISDTPVHDCNTTCQTPKGAINTSLPFQNIHPITIG |
| | | KCPKYVKSTKLRLATGLRNIPSIQSRGLFGAIAGFIEGGWTGMVDG |
| | | WYGYHHQNEQGSGYAADLKSTQNAIDEITNKVNSVIEKMNTQFT |
| | | AVGKEFNHLEKRIENLNKKVDDGFLDIWTYNAELLVLLENERTLD |
| | | YHDSNVKNLYEKVRSQLKNNAKEIGNGCFEFYHKCDNTCMESVK |
| | | NGTYDYPKYSEEAKLNREEIDGVKLESTRIYQILAIYSTVASSLVLV |
| | | VSLGAISFWMCSNGSLQCRICI |
| 136 | 40132- | MKAKLLVLLCAFTATYADTICIGYHANNSTDTVDTVLEKNVTVT |
| | V08B | HSVNLLEDSHNGKLCRLKGIAPLQLGNCSVAGWILGNPKCESLFS |
| | | KESWSYIAETPNPENGTCYPGYFADYEELREQLSSVSSFERFEIFPK |
| | | ESSWPNHTVTKGVTTSCSHNGKSSFYRNLLWLTEKNGLYPNLSKS |
| | | YVNNKEKEVLVLWGVHHPSNIRDQRAIYHTENAYVSVVSSHYSR |
| | | RFTPEIAKRPKVRGQEGRINYYWTLLEPGDTIIFEANGNLIAPWYA |
| | | FALSRGFGSGIITSNASMDECDAKCQTPQGAINSSLPFQNVHPVTIG |
| | | ECPKYVRSTKLRMVTGLRNIPSIQSRGLFGAIAGFIEGGWTGMIDG |
| | | WYGYHHQNEQGSGYAADQKSTQNAINGITNKVNSVIEKMNTQFT |
| | | AVGKEFNKLERRMENLNKKVDDGFLDIWTYNAELLVLLENGRTL |
| | | DFHDSNVKNLYEKVKSQLKNNAKEIGNGCFEFYHKCNNECMESV |
| | | KNGTYDYPKYSEESKLNRGKIDGVKLESMGVYQILAIYSTVASSL |
| | | VLLVSLGAISFWMCSNGSLQCRICI |
| 137 | 40392- | MKAILLVLLCTFAATNADTLCIGYHANNSTDTVDTVLEKNVTVTH |
| | V08B | SVNLLEDRHNGKLCKLGGIAPLHLGKCNIAGWLLGNPECELLLTV |
| | | SSWSYIVETSNSDNGTCYPGDFINYEELREQLSSVSSFERFEIFPKTS |
| | | SWPNHETNRGVTAACPYAGANSFYRNLIWLVEKGNSYPKLSKSY |
| | | VNNKGKEVLVLWGIHHPPTSTDQQSLYQNADAYVFVGSSKYNRK |
| | | FKPEIAARPKVRGQAGRMNYYWTLIEPGDTITFEATGNLVVPRYA |
| | | FAMNRGSGSGIIISDAPVHDCNTKCQTPKGAINTSLPFQNIHPVTIG |
| | | ECPKYVKSTKLRMATGLRNIPSIQSRGLFGAIAGFIEGGWTGMIDG |
| | | WYGYHHQNEQGSGYAADQRSTQNAIDGITNKVNSVIEKMNTQFT |
| | | AVGKEFNHLEKRIENLNKKVDDGFLDIWTYNAELLVLLENERTLD |
| | | FHDSNVKNLYEKVRSQLRNNAKEIGNGCFEFYHKCDDTCMESVK |
| | | NGTYDYPKYSEESKLNREEIDGVKLESTRIYQILAIYSTVASSLVLL |
| | | VSLGAISFWMCSNGSLQCRICI |
| 138 | 40090- | MKATILVVLCIFTASNEDTICIGYHANNSTDTVDTVLEKNVTVTHS |
| | V08B | VNLLEDSHNGKLCKLKGIAPLQLGKCNIAGWLLGNPECDLLLTAS |
| | | SWSYIVETSNSENGTCYPGDFIDYEELREQLSSVSSFEKFEIFPKTSS |
| | | WPNHETTKGVTAACSYAGASSFYRNLLWLTKKGSSYPKLSKSYV |
| | | NNKGKEVLVLWGVHHPPTGTDQQSLYQNADAYVSVGSSKYNRR |
| | | FTPEIAARPKVRDQAGRMNYYWTLLEPGDTITFEATGNLIAPWYA |
| | | FALNRGSGSGIITSDAPVHDCNTKCQTPHGAINSSLPFQNIHPVTIG |
| | | ECPKYVRSTKLRMATGLRNIPSIQSRGLFGAIAGFIEGGWTGMIDG |
| | | WYGYHHQNEQGSGYAADRKSTQNAIDGITNKVNSVIEKMNTQFT |
| | | SVGKEFNHLEKRIENLNRKVDDGFLDVWTYNAELLVLLENERTL |
| | | DYHDSNVKNLYEKVRSQLKNNAKEIGNGCFEFYHKCDDSCMESV |
| | | KNGTYDYPKYSEESKLNREEIDGV |
| 139 | 11684- | MKANLLVLLCALAAADADTICIGYHANNSTDTVDTVLEKNVTVT |
| | V08B | HSVNLLEDSHNGKLCRLKGIAPLQLGKCNIAGWLLGNPECDPLLP |
| | | VRSWSYIVETPNSENGICYPGDFIDYEELREQLSSVSSFERFEIFPKE |
| | | SSWPNHNTNGVTAACSHEGKSSFYRNLLWLTEKEGSYPKLKNSY |
| | | VNKKGKEVLVLWGIHHPPNSKEQQNLYQNENAYVSVVTSNYNR |
| | | RFTPEIAERPKVRDQAGRMNYYWTLLKPGDTIIFEANGNLIAPMY |
| | | AFALSRGFGSGIITSNASMHECNTKCQTPLGAINSSLPYQNIHPVTI |
| | | GECPKYVRSAKLRMVTGLRNIPSIQSRGLFGAIAGFIEGGWTGMID |
| | | GWYGYHHQNEQGSGYAADQKSTQNAINGITNKVNTVIEKMNIQF |
| | | TAVGKEFNKLEKRMENLNKKVDDGFLDIWTYNAELLVLLENERT |
| | | LDFHDSNVKNLYEKVKSQLKNNAKEIGNGCFEFYHKCDNECMES |
| | | VRNGTYDYPKYSEESKLNREKVDGVKLESMGIYQILAIYSTVASSL |
| | | VLLVSLGAISFWMCSNGSLQCRICI |
| 140 | 40133- | MKAKLLVLLCTFTATYADTICIGYHANNSTDTVDTVLEKNVTVTH |
| | V08B | SVNLLEDSHNGKLCLLKGIAPLQLGNCSVAGWILGNPECESLISKE |
| | | SWSYIVETPNPENGTCYPGYFADYEELREQLSSVSSFERFEIFPKES |
| | | SWPNHTVTGVTASCSHNGKSSFYRNLLWLTEKNGLYPNLSNSYV |
| | | NNKEKEVLVLWGVHHPSNIRDQRAIYHTENAYVSVVSSHYSRRFT |
| | | PEIAKRPKVRGQEGRINYYWTLLEPGDTIIFEANGNLIAPWYAFAL |
| | | SRGFGSGIITSNAPMNECDAKCQTPQGAINSSLPFQNVHPVTIGECP |
| | | KYVRSTKLRMVTGLRNIPSIQSRGLFGAIAGFIEGGWTGMMDGW |
| | | YGYHHQNEQGSGYAADQKSTQNAINGITNKVNSVIEKMNTQFTA |
| | | VGKEFNKLERRMENLNKKVDDGFLDIWTYNAELLVLLENERTLD |
| | | FHDSNVKNLYEKVKSQLKNNAKEIGNGCFEFYHKCNNECMESVK |
| | | NGTYDYPKYSEESKLNREKIDGVKLESMGVYQILAIYSTVASSLVL |
| | | LVSLGAISFWMCSNGSLQCRICI |
| 141 | 11708- | MKVKLLVLLCTFTATYADTICIGYHANNSTDTVDTVLEKNVTVTH |
| | V08B | SVNLLEDSHNGKLCLLKGIAPLQLGNCSVAGWILGNPECELLISRE |
| | | SWSYIVEKPNPENGTCYPGHFADYEELREQLSSVSSFERFEIFPKES |
| | | SWPNHTTTGVSASCSHNGESSFYKNLLWLTGKNGLYPNLSKSYA |
| | | NNKEKEVLVLWGVHHPPNIGDQRALYHKENAYVSVVSSHYSRKF |
| | | TPEIAKRPKVRDQEGRINYYWTLLEPGDTIIFEANGNLIAPRYAFAL |
| | | SRGFGSGIINSNAPMDECDAKCQTPQGAINSSLPFQNVHPVTIGECP |
| | | KYVRSAKLRMVTGLRNIPSIQSRGLFGAIAGFIEGGWTGMVDGWY |
| | | GYHHQNEQGSGYAADQKSTQNAINGITNKVNSVIEKMNTQFTAV |
| | | GKEFNKLERRMENLNKKVDDGFIDIWTYNAELLVLLENERTLDFH |
| | | DSNVKNLYEKVKSQLKNNAKEIGNGCFEFYHKCNDECMESVKNG |
| | | TYDYPKYSEESKLNREKIDGVKLESMGVYQILAIYSTVASSLVLLV |
| | | SLGAISFWMCSNGSLQCRICI |
| 142 | 11692- | MKAKLLVLLYAFVATDADTICIGYHANNSTDTVDTIFEKNVAVTH |
| | V08H | SVNLLEDRHNGKLCKLKGIAPLQLGKCNIIGWLLGNPECDSLLPAR |
| | | SWSYIVETPNSENGACYPGDFIDYEELREQLSSVSSLERFEIFPKESS |
| | | WPNHTFNGVTASCSHRGKSSFYRNLLWLTKKGDSYPKLTNSYVN |
| | | NKGKEVLVLWGVHHPSSSDEQQSLYSNGNAYVSVASSNYNRRFT |
| | | PEIAARPKVKDQHGRMNYYWTLLEPGDTIIFEATGNLIAPWYAFA |
| | | LSRGFESGIITSNASMHECNTKCQTPQGSINSNLPFQNIHPVTIGECP |
| | | KYVRSTKLRMVTGLRNIPSIQYRGLFGAIAGFIEGGWTGMIDGWY |
| | | GYHHQNEQGSGYAADQKSTQNAINGITNKVNSIIEKMNTQFTAVG |
| | | KEFNNLEKRMENLNKKVDDGFLDIWTYNAELLVLLENGRTLDFH |
| | | DLNVKNLYEKVKSQLKNNAKEIGNGCFEFYHKCDNECMESVRNG |
| | | TYDYPKYSEESKLNREKIDGVKLESMGVYQILAIYSTVASSLVLLV |
| | | SLGAISFWMCSNGSLQCRICI |
| 143 | 11052- | MKVKLLVLLCTFTATYADTICIGYHANNSTDTVDTVLEKNVTVTH |
| | V08H | SVNLLENSHNGKLCLLKGIAPLQLGNCSVAGWILGNPECELLISKE |
| | | SWSYIVEKPNPENGTCYPGHFADYEELREQLSSVSSFERFEIFPKES |
| | | SWPNHTVTGVSASCSHNGESSFYRNLLWLTGKNGLYPNLSKSYA |
| | | NNKEKEVLVLWGVHHPPNIGDQKALYHTENAYVSVVSSHYSRKF |
| | | TPEIAKRPKVRDQEGRINYYWTLLEPGDTIIFEANGNLIAPRYAFAL |
| | | SRGFGSGIINSNAPMDKCDAKCQTPQGAINSSLPFQNVHPVTIGEC |
| | | PKYVRSAKLRMVTGLRNIPSIQSRGLFGAIAGFIEGGWTGMVDGW |
| | | YGYHHQNEQGSGYAADQKSTQNAINGITNKVNSVIEKMNTQFTA |
| | | VGKEFNKLERRMENLNKKVDDGFIDIWTYNAELLVLLENERTLDF |
| | | HDSNVKNLYEKVKSQLKNNAKEIGNGCFEFYHKCNDECMESVKN |
| | | GTYDYPKYSEESKLNREKIDGVKLESMGVYQILAIYSTVASSLVLL |
| | | VSLGAISFWMCSNGSLQCRICI |
| 144 | 40393- | MEAKLFVLFCVFNALKADTICVGYHANNSTDTVDTILEKNVTVTH |
| | V08B | SVNLLENSHNGKLCSLNGKAPLQLGNCNVAGWILGNPECDLLLT |
| | | ANSWSYIIETSNSKNGKCYPGEFADYEELREQLSTVSSFERFEIFPK |
| | | ATSWPNHETTKGTTTACSHSGASSFYRNLLWIVKKGNSYPKLSKS |
| | | YTNNKGKEVLVIWGVHHPPTNSDQQTLYQNAYTYVSVESSKYYR |
| | | RFTPEIAARPKVRGQAGRMNYYWTLLDQGDTITFEATGNLIAPWY |
| | | AFALNKGSNSGIMMSDAHVHNCTTKCQTPHGALKSNLPFQNVHPI |
| | | TIGECPKYVKSTQLRMATGLRNVPSIQSRGLFGAIAGFIEGGWTGM |
| | | IDGWYGYHHQNEQGSGYAADQKSTQIAIDGISNKVNSVIEKMNIQ |
| | | FTSVGKEFNNLEKRIENLNKKVDDGFLDIWTYNAELLILLENERTL |
| | | DFHDFNVKNLYEKVKSQLRNNAKEVGNGCFEFYHKCDNECMES |
| | | VKNGTYNYPKYSEESKLNREEIDGVKLESMGVHQILAIYSTVASSL |
| | | VLLVSLGAISFWMCSNGSLQCRICI |
| 145 | 40134- | MKAKLLVLLCALSATDADTICIGYHANNSTDTVDTVLEKNVTVT |
| | V08B | HSVNLLEDSHNGKLCRLKGIAPLQLGKCNIAGWILGNPECESLFSK |
| | | KSWSYIAETPNSENGTCYPGYFADYEELREQLSSVSSFERFEIFPKE |
| | | RSWPKHNVTRGVTASCSHKGKSSFYRNLLWLTEKNGSYPNLSKS |
| | | YVNNKEKEVLVLWGVHHPSNIEDQKTIYRKENAYVSVVSSNYNR |
| | | RFTPEIAERPKVRGQAGRINYYWTLLEPGDTIIFEANGNLIAPWHA |
| | | FALNRGFGSGIITSNASMDECDTKCQTPQGAINSSLPFQNIHPVTIG |
| | | ECPKYVRSTKLRMVTGLRNIPSIQSRGLFGAIAGFIEGGWTGMIDG |
| | | WYGYHHQNEQGSGYAADQKSTQNAINGITNKVNSVIEKMNTQFT |
| | | AVGKEFNKLEKRMENLNKKVDDGFLDIWTYNAELLVLLENERTL |
| | | DFHDSNVKNLYEKVKSQLKNNAKEIGNGCFEFYHKCNNECMESV |
| | | KNGTYDYPKYSEESKLNREKIDGVKLESMGVYQILAIYSTVASSL |
| | | VLLVSLGAISFWMCSNGSLQCRICI |
| 146 | 40131- | MKAKLLVLLCAFTATDADTICIGYHANNSTDTVDTVLEKNVTVT |
| | V08B | HSVNLLEDSHNGKLCRLKGIAPLQLGNCSIAGWILGNPECESLFSK |
| | | KSWSYIAETPNSENGTCYPGYFADYEELREQLSSVSSFERFEIFPKE |
| | | SSWPNHTVTKGVTASCSHKGKSSFYRNLLWLTEKNGSYPTLSKSY |
| | | VNNKEKEVLVLWGVHHPSNIGDQRAIYHTENAYVSVVSSHYNRR |
| | | FTPEIAKRPKVRGQEGRINYYWTLLEPGDTIIFEANGNLIAPWYAF |
| | | ALSRGFGSGIITSNASMDECDAKCQTPQGAINSSLPFQNVHPVTIGE |
| | | CPKYVRSTKLRMVTGLRNIPSIQSRGLFGAIAGFIEGGWTGMIDGW |
| | | YGYHHQNEQGSGYAADQKSTQNAINGITNKVNSVIEKMNTQFTA |
| | | VGKEFNKLERRMENLNKKVDDGFLDIWTYNAELLVLLENERTLD |
| | | FHDSNVKNLYEKVKSQLKNNAKEIGNGCFEFYHKCNNECMESVK |
| | | NGTYDYPKYSEESKLNREKIDGVKLESMGVYQILAIYSTVASSLVL |
| | | LVSLGAISFWMCSNGSLQCRICI |
| 147 | 11685- | MEARLFVLFCTFTVLKADIICVGYHANNSTDTVDTVLEKNVTVTH |
| | V08H | SVNLLESSHNGKLCSLNGIPPLQLGKCNVAGWLLGNPECDQLLTA |
| | | NSWSYIIETSNSENGTCYPGEFIDYEELREQLSSVSSFEKFEIFPKAS |
| | | SWPNHETTKGVTAACPYLGNSNFYRNLLWITKKGNSYPELSKSYT |
| | | NNKGKEVLILWGVHHPPSTNEQQNLYQNANAYVSVGSSKYNRRF |
| | | TPEIAARPKVRGQAGRMNYYWTLLDQGDTITFEATGNLIAPWYAF |
| | | ALNKNSDSGIMMSDAPVHNCDTKCQTPHGALNSSLPFQNVHPITI |
| | | GECPKYIKSTKLRMATGLRNVPSIQSRGLFGAIAGFIEGGWTGMID |
| | | GWYGYHHQNEQGSGYAADQKSTQNAIDGITNKVNSVIEKMNTQF |
| | | TAVGKEFNNLEKRIENLNKKVDDGFLDVWTYNAELLVLLENERT |
| | | LDFHDSNVRNLYEKVKSQLRNNAKEIGNGCFEFYHKCDDECMES |
| | | VKNGTYDYPKYSEESKLNREEIDGVKLESMGVYQILAIYSTVASSL |
| | | VLLVSLGAISFWMCSNGSLQCRVCI |
| 148 | 11688- | MAIIYLILLFTAVRGDQICIGYHANNSTEKVDTILERNVTVTHAKDI |
| | V08H | LEKTHNGKLCKLNGIPPLELGDCSIAGWLLGNPECDRLLSVPEWS |
| | | YIMEKENPRDGLCYPGSFNDYEELKHLLSSVKHFEKVKILPKDRW |
| | | TQHTTTGGSRACAVSGNPSFFRNMVWLTKKGSNYPVAQGSYNNT |
| | | SGEQMLIIWGVHHPNDETEQRTLYQNVGTYVSVGTSTLNKRSTPE |
| | | IATRPKVNGQGGRMEFSWTLLDMWDTINFESTGNLIAPEYGFKIS |
| | | KRGSSGIMKTEGTLENCETKCQTPLGAINTTLPFHNVHPLTIGECP |
| | | KYVKSEKLVLATGLRNVPQIESRGLFGAIAGFIEGGWQGMVDGW |
| | | YGYHHSNDQGSGYAADKESTQKAFDGITNKVNSVIEKMNTQFEA |
| | | VGKEFSNLERRLENLNKKMEDGFLDVWTYNAELLVLMENERTLD |
| | | FHDSNVKNLYDKVRMQLRDNVKELGNGCFEFYHKCDDECMNSV |
| | | KNGTYDYPKYEEESKLNRNEIKGVKLSSMGVYQILAIYATVAGSL |
| | | SLAIMMAGISFWMCSNGSLQCRICI |
| 149 | 40119- | MKTIIALSYILCLVFAQKLPGNDNSTATLCLGHHAVPNGTIVKTIT |
| | V08B | NDQIEVTNATELVQSSSTGGICDSPHQILDGENCTLIDALLGDPQC |
| | | DGFQNKKWDLFVERSKAYSNCYPYDVPDYASLRSLVASSGTLEF |
| | | NNESFNWAGVTQNGTSSACKRRSNKSFFSRLNWLTHLKYKYPAL |
| | | NVTMPNNEKFDKLYIWGVHHPGTDSDQISLYAQASGRITVSTKRS |
| | | QQTVIPNIGSRPRVRDVSSRISIYWTIVKPGDILLINSTGNLIAPRGY |
| | | FKIRSGKSSIMRSDAPIGKCNSECITPNGSIPNDKPFQNVNRITYGAC |
| | | PRYVKQNTLKLATGMRNVPEKQTRGIFGAIAGFIENGWEGMVDG |
| | | WYGFRHQNSEGTGQAADLKSTQAAINQINGKLNRLIGKTNEKFH |
| | | QIEKEFSEVEGRIQDLEKYVEDTKIDLWSYNAELLVALENQHTIDL |
| | | TDSEMNKLFERTKKQLRENAEDMGNGCFKIYHKCDNACIESIRNG |
| | | TYDHDVYRDEALNNRFQIKGVELKSGYKDWILWISFAISCFLLCV |
| | | ALLGFIMWACQKGNIRCNICI |
| 150 | 11715- | MKTIIALSYILCLVFAQKLPGNDNSTATLCLGHHAVPNGTIVKTIT |
| | V08B | NDQIEVTNATELVQSSSTGGICDSPHQILDGENCTLIDALLGDPQC |
| | | DGFQNKKWDLFVERSKAYSNCYPYDVPDYASLRSLVASSGTLEF |
| | | NNESFNWAGVTQNGTSSACKRRSNKSFFSRLNWLTHLKYKYPAL |
| | | NVTMPNNEKFDKLYIWGVHHPGTDSDQISLYAQASGRITVSTKRS |
| | | QQTVIPNIGSRPRVRDVSSRISIYWTIVKPGDILLINSTGNLIAPRGY |
| | | FKIRSGKSSIMRSDAPIGKCNSECITPNGSIPNDKPFQNVNRITYGAC |
| | | PRYVKQNTLKLATGMRNVPEKQTRGIFGAIAGFIENGWEGMVDG |
| | | WYGFRHQNSEGTGQAADLKSTQAAINQINGKLNRLIGKTNEKFH |
| | | QIEKEFSEVEGRIQDLEKYVEDTKIDLWSYNAELLVALENQHTIDL |
| | | TDSEMNKLFERTKKQLRENAEDMGNGCFKIYHKCDNACIESIRNG |
| | | TYDHDVYRDEALNNRFQIKGVELKSGYKDWILWISFAISCFLLCV |
| | | ALLGFIMWACQKGNIRCNICI |
| 151 | 40120- | MKTIIALSYILCLVFAQKLPGNDNSTATLCLGHHAVPNGTIVKTIT |
| | V08B | NDQIEVTNATELVQSSSTGGICDSPHQILDGENCTLIDALLGDPQC |
| | | DGFQNKKWDLFVERSKAYSNCYPYDVPDYASLRSLVASSGTLEF |
| | | NNESFNWTGVTQNGTSSACKRRSNKSFFSRLNWLTHLKYKYPAL |
| | | NVTMPNNEKFDKLYIWGVLHPGTDSDQIRLYAQASGRITVSTKRS |
| | | QQTVIPNIGSRPRVRDVSSRISIYWTIVKPGDILLINSTGNLIAPRGY |
| | | FKIRSGKSSIMRSDAPIGKCNSECITPNGSIPNDKPFQNVNRITYGAC |
| | | PRYIKQNTLKLATGMRNVPEKQTRGIFGAIAGFIENGWEGMVDG |
| | | WYGFRHQNSEGTGQAADLKSTQAAINQINGKLNRLIGKTNEKFH |
| | | QIEKEFSEVEGRIQDLEKYVEDTKIDLWSYNAELLVALENQYTIDL |
| | | TDSEMNKLFERTKKQLRENAEDMGNGCFKIYHK |
| 152 | 40145- | MKTIIALSHILCLVFAQKLPGNDNSTATLCLGHHAVPNGTIVKTIT |
| | V08B | NDQIEVTNATELVQNSSIGEICDSPHQILDGENCTLIDALLGDPQCD |
| | | GFQNKKWDLFVERSKAYSNCYPYDVPDYASLRSLVASSGTLEFN |
| | | NESFNWTGVTQNGTSSACIRRSNNSFFSRLNWLTQLNFKYPALNV |
| | | TMPNNEQFDKLYIWGVHHPVTDKDQIFLYAQSSGRITVSTKRSQQ |
| | | AVIPNIGYRPRIRNIPSRISIYWTIVKPGDILLINSTGNLIAPRGYFKIR |
| | | SGKSSIMRSDAPIGKCNSECITPNGSIPNDKPFQNVNRITYGACPRY |
| | | VKQSTLKLATGMRNVPEKQTRGIFGAIAGFIENGWEGMVDGWYG |
| | | FRHQNSEGRGQAADLKSTQAAIDQINGKLNRLIGKTNEKFHQIEKE |
| | | FSEVEGRIQDLEKYVEDTKIDLWSYNAELLVALENQHTIDLTDSE |
| | | MNKLFEKTKKQLRENAEDMGNGCFKIYHKCDNACIGSIRNGTYD |
| | | HDVYRDEALNNRFQIKGVELKSGYKDWILWISFAISCFLLCVALL |
| | | GFIMWACQKGNIRCNICI |
| 153 | 40494- | MKTIIALSYILCLVFAQKLPENDNSTATLCLGHHAVPNGTIVKTITS |
| | V08B-50 | DRIEVTNATELVQNSSIGEICDSPHQILDGKNCTLIDALLGDPQCDG |
| | | FQNKKWDLFVERSKAYSNCYPYDVPDYASLRSLVASSGTLEFNDE |
| | | SFNWAGVTQNGTSSACIRGSNSSFFSRLNWLTHSNFKYPALNVTM |
| | | PNNEQFDKLYIWGVHHPGTDKDQIFLYAQSSGRITVSTKRSQQAVI |
| | | PNIGSRPRIRNIPSRISIYWTIVKPGDILLINSTGNLIAPRGYFKIRSGK |
| | | SSIMRSDAPIGKCKSECITPNGSIPNDKPFQNVNRITYGACPRYVKQ |
| | | STLKLATGMRNVPEKQTRGIFGAIAGFIENGWEGMKDGWYGFRH |
| | | QNSEGRGQAADLKSTQAAIDQINGKLNRLIGKTNEKFHQIEKEFSE |
| | | VEGRIQDLEKYVEDTKIDLWSYNAELLVALENQHTIDLTDSEMNK |
| | | LFEKTKKQLRENAEDMGNGCFKIYHKCDNACIGSIRNGTYDHDV |
| | | YRDEALNNRFQIKGVELKSGYKDWILWISFAISCFLLCVALLGFIM |
| | | WACQKGNIRCNICI |
| 154 | 40118- | MKTIIALSYILCLVFAQKLPGNDNSTATLCLGHHAVPNGTIVKTIT |
| | V08B | NDQIEVTNATELVQSSSTGGICDSPHQILDGENCTLIDALLGDPQC |
| | | DGFQNKKWDLFVERSKAYSNCYPYDVPDYASLRSLVASSGTLEF |
| | | NNESFNWTGVTQNGTSSSCKRRSNNSFFSRLNWLTHLKFKYPALN |
| | | VTMPNNEKFDKLYIWGVHHPGTNNDQISLYTQASGRITVSTKRSQ |
| | | QTVIPNIGSRPRVRDIPSRISIYWTIVKPGDILLINSTGNLIAPRGYFKI |
| | | RSGKSSIMRSDAPIGKCNSECITPNGSIPNDKPFQNVNRITYGACPR |
| | | YVKQNTLKLATGMRNVPEKQTRGIFGAIAGFIENGWEGMVDGW |
| | | YGFRHQNSEGIGQAADLKSTQAAINQINGKLNRLIGKTNEKFHQIE |
| | | KEFSEVEGRIQDLEKYVEDTKIDLWSYNAELLVALENQHTIDLTDS |
| | | EMNKLFERTKKQLRENAEDMGNGCFKIYHKCDNACIGSIRNGTY |
| | | DHDVYRDEALNNRFQIKGVELKSGYKDWILWISFAISCFLLCVAL |
| | | LGFIMWACQKGNIRCNICI |
| 155 | 40149- | MKTIIALSYILCLVFAQKIPGNDNSTATLCLGHHAVPNGTLVKTIT |
| | V08B | NDQIEVTNATELVQSSSTGRICDSPHRILDGENCTLIDALLGDPHCD |
| | | GFQNKEWDLFVERSKAYSNCYPYDVPDYASLRSLVASSGTLEFNN |
| | | ESFNWTGVAQNGTSYACKRSSIKSFFSRLNWLHQLKYKYPALNVT |
| | | MPNNDKFDKLYIWGVHHPSTDSDQTSIYAQASGRVTVSTKRSQQT |
| | | VIPNIGSRPWVRGISSRISIHWTIVKPGDILLINSTGNLIAPRGYFKIR |
| | | SGKSSIMRSDAPIGKCNSECITPNGSIPNDKPFQNVNRITYGACPRY |
| | | VKQNTLKLATGMRNVPEKQTRGIFGAIAGFIENGWEGMVDGWY |
| | | GFRHQNSEGTGQAADLKSTQAAINQINGKLNRLIEKTNEKFHQIEK |
| | | EFSEVEGRIQDLEKYVEDTKIDLWSYNAELLVALENQHTIDLTDSE |
| | | MNKLFERTRKQLRENAEDMGNGCFKIYHKCDNACIGSIRNGTYD |
| | | HDVYRDEALNNRFQIKGVELKSGYKDWILWISFAISCFLLCVVLL |
| | | GFIMWACQKGNIRCNICI |
| 156 | 40485- | MKTIIALSYILCLVFAQKLPGNDNSTATLCLGHHAVPNGTLVKTIT |
| | V08B-50 | NDQIEVTNATELVQSSSTGRICDSPHRILDGKNCTLIDALLGDPHC |
| | | DGFQNKEWDLFVERSKAYSNCYPYDVPDYASLRSLVASSGTLEFT |
| | | NEGFNWTGVAQDGTSYACKRGSVKSFFSRLNWLHKLEYKYPALN |
| | | VTMPNNDKFDKLYIWGVHHPSTDSVQTSLYVQASGRVTVSTKRS |
| | | QQTVIPNIGSRPWVRGISSRISIYWTIVKPGDILLINSTGNLIAPRGYF |
| | | KIRSGKSSIMRSDAPIGNCNSECITPNGSIPNDKPFQNVNRITYGACP |
| | | RYVKQNTLKLATGMRNVPEKQTRGIFGAIAGFIENGWEGMVDGW |
| | | YGFRHQNSEGTGQAADLKSTQAAINQINGKLNRLIEKTNEKFHQIE |
| | | KEFSEVEGRIQDLEKYVEDTKIDLWSYNAELLVALENQHTIDLTDS |
| | | EMNKLFERTRKQLRENAEDMGNGCFKIYHKCDNACIGSIRNGTY |
| | | DHDVYRDEALNNRFQIKGVELKSGYKDWILWISFAISCFLLCVVL |
| | | LGFIMWACQKGNIRCNICI |
| 157 | 40146- | MKTIIALSYILCLVFAQKLPGNDNSTATLCLGHHAVPNGTIVKTIT |
| | V08B-50 | NDQIEVTNATELVQNSSIGEICDSPHQILDGENCTLIDALLGDPQCD |
| | | GFQNKKWDLFVERSKAYSNCYPYDVPDYASLRSLVASSGTLEFN |
| | | NESFNWTGVTQNGTSSACIRRSNNSFFSRLNWLTHLNFKYPALNV |
| | | TMPNNEQFDKLYIWGVHHPGTDKDQIFLYAQSSGRITVSTKRSQQ |
| | | AVIPNIGSRPRIRNIPSRISIYWTIVKPGDILLINSTGNLIAPRGYFKIR |
| | | SGKSSIMRSDAPISKCKSECITPNGSIPNDKPFQNVNRITYGACPRY |
| | | VKQSTLKLATGMRNVPEKQTRGIFGAIAGFIENGWEGMVDGWYG |
| | | FRHQNSEGRGQAADLKSTQAAIDQINGKLNRLIGKTNEKFHQIEKE |
| | | FSEVEGRIQDLEKYVEDTKIDLWSYNAELLVALENQHTIDLTDSE |
| | | MNKLFEKTKKQLRENAEDMGNGCFKIYHKCDNACIGSIRNGTYD |
| | | HDVYRDEALNNRFQIKGVELKSGYKDWILWISFAISCFLLCVALL |
| | | GFIMWACQKGNIRCNICI |
| 158 | 40043- | MKTIIALSYILCLVFAQKLPGNDNSTATLCLGHHAVPNGTIVKTIT |
| | V08H | NDQIEVTNATELVQSSSTGEICDSPHQILDGKNCTLIDALLGDPQC |
| | | DGFQNKKWDLFVERSKAYSNCYPYDVPDYASLRSLVASSGTLEF |
| | | NNESFNWTGVTQNGTSSACIRRSKNSFFSRLNWLTHLNFKYPALN |
| | | VTMPNNEQFDKLYIWGVHHPGTDKDQIFLYAQASGRITVSTKRSQ |
| | | QTVSPNIGSRPRVRNIPSRISIYWTIVKPGDILLINSTGNLIAPRGYFK |
| | | IRSGKSSIMRSDAPIGKCNSECITPNGSIPNDKPFQNVNRITYGACPR |
| | | YVKQNTLKLATGMRNVPEKQTRGIFGAIAGFIENGWEGMVDGW |
| | | YGFRHQNSEGRGQAADLKSTQAAIDQINGKLNRLIGKTNEKFHQI |
| | | EKEFSEVEGRIQDLEKYVEDTKIDLWSYNAELLVALENQHTIDLTD |
| | | SEMNKLFEKTKKQLRENAEDMGNGCFKIYHKCDNACIGSIRNGTY |
| | | DHDVYRDEALNNRFQIKGVELKSGYKDWILWISFAISCFLLCVAL |
| | | LGFIMWACQKGNIRCNICI |
| 159 | 11056- | MKTIIALSYILCLVFTQKLPGNDNSTATLCLGHHAVPNGTIVKTITN |
| | V08H | DQIEVTNATELVQSSSTGEICDSPHQILDGENCTLIDALLGDPQCDG |
| | | FQNKKWDLFVERSKAYSNCYPYDVPDYASLRSLVASSGTLEFNNE |
| | | SFNWTGVTQNGTSSACIRRSNNSFFSRLNWLTHLKFKYPALNVTM |
| | | PNNEKFDKLYIWGVHHPGTDNDQIFPYAQASGRITVSTKRSQQTVI |
| | | PNIGSRPRVRNIPSRISIYWTIVKPGDILLINSTGNLIAPRGYFKIRSG |
| | | KSSIMRSDAPIGKCNSECITPNGSIPNDKPFQNVNRITYGACPRYVK |
| | | QNTLKLATGMRNVPEKQTRGIFGAIAGFIENGWEGMVDGWYGFR |
| | | HQNSEGIGQAADLKSTQAAIDQINGKLNRLIGKTNEKFHQIEKEFS |
| | | EVEGRIQDLEKYVEDTKIDLWSYNAELLVALENQHTIDLTDSEMN |
| | | KLFEKTKKQLRENAEDMGNGCFKIYHKCDNACIGSIRNGTYDHD |
| | | VYRDEALNNRFQIKGVELKSGYKDWILWISFAISCFLLCVALLGFI |
| | | MWACQKGNIRCNICI |
| 160 | 40116- | MKTIIALSYIFCLALGQDLPGNDNSTATLCLGHHAVPNGTLVKTIT |
| | V08B | DDQIEVTNATELVQSSSTGKICNNPHRILDGIDCTLIDALLGDPHCD |
| | | VFQNETWDLFVERSKAFSNCYPYDVPDYASLRSLVASSGTLEFITE |
| | | GFTWTGVTQNGGSNACKRGPGSGFFSRLNWLTKSGSTYPVLNVT |
| | | MPNNDNFDKLYIWGVHHPSTNQEQTSLYVQASGRVTVSTRRSQQ |
| | | TIIPNIGSRPWVRGLSSRISIYWTIVKPGDVLVINSNGNLIAPRGYFK |
| | | MRTGKSSIMRSDAPIDTCISECITPNGSIPNDKPFQNVNKITYGACP |
| | | KYVKQNTLKLATGMRNVPEKQTRGLFGAIAGFIENGWEGMIDGW |
| | | YGFRHQNSEGTGQAADLKSTQAAIDQINGKLNRVIEKTNEKFHQI |
| | | EKEFSEVEGRIQDLEKYVEDTKIDLWSYNAELLVALENQHTIDLTD |
| | | SEMNKLFEKTRRQLRENAEDMGNGCFKIYHKCDNACIESIRNGTY |
| | | DHDVYRDEALNNRFQIKGVELKSGYKDWILWISFAISCFLLCVVL |
| | | LGFIMWACQRGNIRCNICI |
| 161 | 40154- | MKTIIALSYILCLVFAQKLPGNDNSTATLCLGHHAVPNGTLVKTIT |
| | V08B | NDQIEVTNATELVQSSSTGRICDSPHQILDGENCTLIDALLGDPHCD |
| | | GFQNKEWDLFVERSKAYSNCYPYDVPDYASLRSLVASSGTLEFNN |
| | | ESFNWTGVAQNGTSSACKRRSIKSFFSRLNWLHQLENRYPALNVT |
| | | MPNNDKFDKLYIWGVHHPSTDSVQTSVYVQASGRVTVSTKRSQQ |
| | | TVIPNIGSRPWVRGVSSRISIYWTIVKPGDILLINSTGNLIAPRGYFKI |
| | | RSGKSSIMRSDAPIGKCNSECITPNGSIPNDKPFQNVNRITYGACPR |
| | | YVKQNTLKLATGMRNVPEKQTRGIFGAIAGFIENGWEGMMDGW |
| | | YGFRHQNSEGTGQAADLKSTQAAINQINGKLNRLIEKTNEKFHQIE |
| | | KEFSEVEGRIQDLEKYVEDTKIDLWSYNAELLVALENQHTIDLTDS |
| | | EMNKLFERTRKQLRENAEDMGNGCFKIYHKCDNACIGSIRNGTY |
| | | DHDVYRDEALNNRFQIKGVELKSGYKDWILWISFAISCFLLCVVL |
| | | LGFIMWACQKGNIRCNICI |
| 162 | 11702- | MEKIVLLLAIVSLVKSDQICIGYHANNSTEQVDTIMERNVTVTHAQ |
| | V08H | DILEKTHNGKLCNLDGVKPLILRDCSVAGWLLGNPMCDEFLNVPE |
| | | WSYIVEKINPANDLCYPGNFNDYEELKHLLSRINHFEKIQIIPKNSW |
| | | SDHEASGVSSACPYQGRSSFFRNVVWLTQKDNAYPTIKRSYNNTN |
| | | QEDLLVLWGIHHPNDAAEQTRLYQNPTTYISVGTSTLNQRLIPKIA |
| | | TRSKVNGQSGRMEFFWTILKSNDAINFESNGNFIAPENAYKIVKKG |
| | | DSTIMKSELEYGNCNTKCQTPIGAINSSMPFHNIHPLTIGECPKYVK |
| | | SNRLVLATGLRNSPQGERRRKKRGLFGAIAGFIEGGWQGMVDGW |
| | | YGYHHSNEQGSGYAADKESTQKAIDGVTNKVNSIIDKMNTQFEA |
| | | VGREFNNLERRIENLNKKMEDGFLDVWTYNAELLVLMENERTLD |
| | | FHDSNVKNLYDKVRLQLRDNAKELGNGCFEFYHRCDNECMESVR |
| | | NGTYDYPQYSEEARLKREEISGVKLESIGTYQILSIYSTVASSLALAI |
| | | MVAGLFLWMCSNGSLQCRICI |
| 163 | 40158- | MEKIVLLLAMIGLVKSDQICIGYHANNSTEQVDTIMEKNVTVTHA |
| | V08B | QDILEKTHNGKLCNLDGVKPLILKDCSVAGWLLGNPMCDEFLNV |
| | | SEWSYIVEKASPANGLCYPGDFNDYEELKHLLSRINHLKKIKIIPKS |
| | | YWSNHEASSGVSAACSYLGEPSFFRNVVWLIKKNNTYPPIKVNYT |
| | | NTNQEDLLVLWGIHHPNDEKEQIRIYQNPNTSISVGTSTLNQRLVP |
| | | KIATRPKVNGQSGRMEFFWTILKPNDSINFDSNGNFIAPEYAYKIA |
| | | KKGDSVIMKSELEYGNCNTKCQTPMGAINSSMPFHNIHPLTIGECP |
| | | KYVKSNRLVLATGLRNAPQREGGRRRKRGLFGAIAGFIEGGWQG |
| | | MVDGWYGYHHSNEQGSGYAADKESTQKAIDGITNKVNSIIDKMN |
| | | TQFEIVGREFNNLERRIENLNKKMEDGFLDVWTYNAELLVLMENE |
| | | RTLDFHDSNVKNLYEKVRLQLRDNAKELGNGCFEFYHKCDNECM |
| | | ESVRNGTYDYPQYSEEARLSREEISGVKMESMVTYQILSIYSTVAS |
| | | SLALAIMVAGLSLWMCSNGSLQCRICI |
| 164 | 11062- | MEKIVLLFAIVSLVKSDQICIGYHANNSTEQVDTIMEKNVTVTHAQ |
| | V08H1 | DILEKTHNGKLCDLDGVKPLILRDCSVAGWLLGNPMCDEFINVPE |
| | | WSYIVEKANPVNDLCYPGDFNDYEELKHLLSRINHFEKIQIIPKSS |
| | | WSSHEASLGVSSACPYQGKSSFFRNVVWLIKKNSTYPTIKRSYNN |
| | | TNQEDLLVLWGIHHPNDAAEQTKLYQNPTTYISVGTSTLNQRLVP |
| | | RIATRSKVNGQSGRMEFFWTILKPNDAINFESNGNFIAPEYAYKIV |
| | | KKGDSTIMKSELEYGNCNTKCQTPMGAINSSMPFHNIHPLTIGECP |
| | | KYVKSNRLVLATGLRNSPQRERRRKKRGLFGAIAGFIEGGWQGM |
| | | VDGWYGYHHSNEQGSGYAADKESTQKAIDGVTNKVNSIIDKMNT |
| | | QFEAVGREFNNLERRIENLNKKMEDGFLDVWTYNAELLVLMENE |
| | | RTLDFHDSNVKNLYDKVRLQLRDNAKELGNGCFEFYHKCDNEC |
| | | MESVRNGTYDYPQYSEEARLKREEISGVKLESIGIYQILSIYSTVAS |
| | | SLALAIMVAGLSLWMCSNGSLQCR |
| 165 | 40160- | MEKIVLLFAIISLVKSDHICIGYHANNSTEQVDTIMEKNVTVTHAQ |
| | V08B | DILEKTHNGKLCDLNGVKPLILKDCSVAGWLLGNPMCDEFIDVPE |
| | | WSYIVEKANPANDLCYPGNFNDYEELKHLLSRINHFEKIRIIPKDS |
| | | WPDHEASLGVSAACSYQGNSSFFRNVVWLLKKDNAYPIIKKSYN |
| | | NTNKEDLLVLWGIHHPNDEAEQTRLYQNPTTYVSIGTSTLNQRLV |
| | | PRIATRSKVNGQSGRIDFFWTILKPNDAINFESNGNFIAPEYAYKIV |
| | | KKGDSTIMRSEVEYGNCSTRCQTPMGAINSSMPFHNIHPLTIGECP |
| | | KYVKSNKLVLATGLRNSPQIERRRRKRGLFGAIAGFIEGGWQGMV |
| | | DGWYGYHHSNEQGSGYAADKESTQKAIDGVTNKVNSIIDKMNTQ |
| | | FEAVGREFNNLERRIENLNKKMEDGFLDVWTYNAELLVLMENER |
| | | TLDFHDSNVKNLYDKVRLQLRDNAKELGNGCFEFYHKCDNECM |
| | | ESVRNGTYDYPQYSEEARLKREEISGVKLESIGTYQILSIYSTVASS |
| | | LVLAIMVAGLSLWMCSNGSLQCRICI |
| 166 | 11689- | MEKIVLLLATVSLVKSDQICIGYHANNSTEQVDTIMEKNVTVTHA |
| | V08H-50 | QDILERTHNGKLCDLNGVKPLILRDCSVAGWLLGNPMCDEFINVP |
| | | EWSYIVEKASPANDLCYPGNFNDYEELKHLLSRISHFEKIQIIPKSS |
| | | WSNHDASSGVSSACPYLGKSSFFRNVVWLIKKNSTYPTIKRSYNN |
| | | TNQEDLLVLWGIHHPNDAAEQTKLYQNPTTYISVGTSTLNQRLVP |
| | | EIATRPKVNGQSGRIEFFWTILKPNDAINFESNGNFIAPEYAYKIVK |
| | | KGDSTIMKSELEYGNCNTKCQTPMGAINSSMPFHNIHPLTIGECPK |
| | | YVKSNRLVLATGLRNAPQRERRRKKRGLFGAIAGFIEGGWQGMV |
| | | DGWYGYHHSNEQGSGYAADQESTQKAIDGVTNKVNSIINKMNTQ |
| | | FEAVGREFNNLERRIENLNKKMEDGFLDVWTYNAELLVLMENER |
| | | TLDFHDSNVKNLYDKVRLQLRDNAKELGNGCFEFYHKCDNECM |
| | | ESVKNGTYDYPQYSEEARLNREEISGVKLESMGTYQILSLYSTVAS |
| | | SLALAIMVAGLSLWMCSNGSLQCRICI |
| 167 | 40166- | MIAIIVIAILAAAGKSDKICIGYHANNSTTQVDTILEKNVTVTHSVE |
| | V08B | LLENQKEERFCKILNKAPLDLRGCTIEGWILGNPQCDLLLGDQSWS |
| | | YIVERPNAQYGICYPGVLNEVEELKALIGAGERVERFEMFPKSTW |
| | | AGVDTSSGVTRACPYNSGSSFYRNLLWIIKTKSAAYPVIRGTYNNT |
| | | GKQPILYFWGVHHPPDINEQNTLYGSGDRYVRMGTENMNFAKSP |
| | | EIAARPAVNGQRGRIDYYWSVLKPGETLNVESNGNLIAPWYAYKF |
| | | VSTNNKGAIFKSNLPIENCDATCQTIAGALRTNKTFQNVSPLWIGE |
| | | CPKYVKSESLRLATGLRNVPQIETRGLFGAIAGFIEGGWTGMIDG |
| | | WYGYHHENSQGSGYAADRESTQKAIDGITNKVNSIIDKMNTQFEA |
| | | VDHEFSNLERRIDNLNKRMEDGFLDVWTYNAELLVLLENERTLD |
| | | LHDANVKNLYEKVKSQLRDNANDLGNGCFEFWHKCDNECIESVK |
| | | NGTYDYPKYQDESKLNRQEIESVKLENLGVYQILAIYSTVSSSLVL |
| | | VGLIIAMGLWMCSNGSMQCRICI |
| 168 | 40399- | MIAFIVIAILVTTGKSDKICIGYHANNSTTKVDTILEKNVTVTHSVE |
| | V08H1- | LLENQKEERFCKISNKAPLDLRDCTLEGWILGNPRCGILLADQSWS |
| | 50 | YIVERPNARNGICYPGTLNEVEELKALIGSGERVERFEMFPKSTWA |
| | | GVDTNSGVSSACPLGNGPSFYRNLLWIIKHTTSGYPVIKGTYTNTG |
| | | DKSVLYFWGVHHPPDTTEQNVLYGSGNRYVRMGTESMNFARSPE |
| | | VAARPAVNGQRGRIDYFWSILKPGETLNVESNGNLIAPWYAYRFV |
| | | NKDSKGAIFRSNLPIENCDATCQTTEGVIRTNKTFQNVSPLWIGEC |
| | | PKYVKSKSLRLATGLRNVPQIETRGLFGDIAGFIEGGWTGMIDGW |
| | | YGYHHENSQGSGYAADRESTQKAIDGITNKVNSIIDKMNTQFEAV |
| | | GHEFSNLERRIDNLNKRMEDGFLDVWTYNAELLVLLENERTLDL |
| | | HDANVKNLHERVKSQLRDNANDLGNGCFEFWHKCDNECMESVK |
| | | NGTYNYPKYQAESRLNKQKIESVKLEEFGVYQILAIYSTVSSSLVL |
| | | VGLIMAMGLWMCSNGSMQCRICI |
| 169 | 40171- | MNTQILILAISAFLCVRADKICLGHHAVSNGTKVDTLTEKGIEVVN |
| | V08B | ATETVEQKNIPKICSKGKQTIDLGQCGLLGTTIGPPQCDQFLEFSAN |
| | | LIIERREGDDICYPGKFDNEETLRQILRKSGGIKKENMGFTYTGVRT |
| | | NGETSACRRSRSSFYAEMKWLLSNTDNGVFPQMTKSYKNTKREP |
| | | ALIIWGIHHSGSTAEQTRLYGSGNKLVTVWSSKYQQSFAPSPGPKP |
| | | QINGQSGRIDFYWLMLDPNDTVTFSFNGAFIAPDRASFLRGKSLGI |
| | | QSDAQLDNNCEGECYHIGGTIISNLPFQNINSRAIGKCPRYVKQKS |
| | | LMLATGMKNVPENSIHKQLTHHMRKKRGLFGAIAGFIENGWEGLI |
| | | DGWYGYRHQNAQGEGTAADYKSTQSAINQITGKLNRLIEKTNQQ |
| | | FELIDNEFNEIEKQIGNVINWTRDSIIEVWSYNAEFLVAVENQHTID |
| | | LTDSEMNKLYEKVRRQLRENAEEDGNGCFEIFHQCDNDCMASIR |
| | | NNTYDHKKYRKEAIQNRIQIDAVKLSSGYKDIILWFSFGASCFLFL |
| | | AIAMVLAFICIKNGNMRCTICI |
| 170 | 11082- | SKSRGYKMNTQILVFALVASIPTNADKICLGHHAVSNGTKVNTLT |
| | V08B | ERGVEVVNATETVERTNVPRICSKGKRTVDLGQCGLLGTITGPPQ |
| | | CDQFLEFSADLIIERREGSDVCYPGKFVNEEALRQILRESGGIDKET |
| | | MGFTYSGIRTNGTTSACRRSGSSFYAEMKWLLSNTDNAAFPQMT |
| | | KSYKNTRKDPALIIWGIHHSGSTTEQTKLYGSGNKLITVGSSNYQQ |
| | | SFVPSPGARPQVNGQSGRIDFHWLILNPNDTVTFSFNGAFIAPDRA |
| | | SFLRGKSMGIQSEVQVDANCEGDCYHSGGTIISNLPFQNINSRAVG |
| | | KCPRYVKQESLLLATGMKNVPEIPKRRRRGLFGAIAGFIENGWEG |
| | | LIDGWYGFRHQNAQGEGTAADYKSTQSAIDQITGKLNRLIEKTNQ |
| | | QFELIDNEFTEVERQIGNVINWTRDSMTEVWSYNAELLVAMENQ |
| | | HTIDLADSEMNKLYERVKRQLRENAEEDGTGCFEIFHKCDDDCM |
| | | ASIRNNTYDHSKYREEAIQNRIQIDPVKLSSGYKDVILWFSFGASCF |
| | | ILLAIAMGLVFICVKNGNMRCTICI |
| 171 | 40325- | TQILVFALIAIIPTNADKICLGHHAVSNGTKVNTLTERGVEVVNAT |
| | V08H | ETVERTNIPRICSKGKRTVDLGQCGLLGTITGPPQCDQFLEFSADLII |
| | | ERREGSDVCYPGKFVNEEALRQILRESGGIDKEAMGFTYSGIRTNG |
| | | ATSACRRSGSSFYAEMKWLLSNTDNAAFPQMTKSYKNTRKSPALI |
| | | VWGIHHSVSTAEQTKLYGSGNKLVTVGSSNYQQSFVPSPGARPPV |
| | | NGLSGRIDFHWLMLNPNDTVTFSFNGAFIAPDRASFLRGKSMGIQS |
| | | GVQVDANCEGDCYHSGGTIISNLPFQNIDSRAVGKCPRYVKQRSL |
| | | LLATGMKNVPEIPKGRGLFGAIAGFIENGWEGLIDGWYGFRHQNA |
| | | QGEGTAADYKSTQSAIDQITGKLNRLIEKTNQQFELIDNEFNEVEK |
| | | QIGNVINWTRDSITEVWSYNAELLVAMENQHTIDLADSEMDKLYE |
| | | RVKRQLRENAEEDGTGCFEIFHKCDDDCMASIRNNTYDHSKYREE |
| | | AMQNRIQIDPVKLSSGYKDVILWFSFGASCFILLAIVMGLVFICVK |
| | | N |

TABLE 9
Sequences of gp160 antigens that can be included in an
HIV vaccine

| ASC | | SEQ | |
|---|---|---|---|
| number | Clade | ID | Sequence |
| A.IN.01. | A | 172 | MRVMETQRSYQHLWRWGTMILGMLIIYSAAENLWVTVY |
| 1579A.D | | | YGVPVWKDAETTLFCASDAKAYETEKHNVWATHACVPT |
| Q083238 | | | DPNPQEIHLENVTEDFNMWKNNMVEQMHTDIISLWDQSL |
| | | | KPCVKLTPLCVTLNCSNVNNTQEVKNCTFNMTTELRDKR |
| | | | QKVSSLFYKLDIVPIEEGQGNSSNSSYEEYRLINCNTSAITQ |
| | | | ACPKVTFEPIPIHYCTPAGFAILKCKDEEFNGTGPCRNVST |
| | | | VQCTHGIKPVVSTQLLLNGSLAKNKVIIRSENITNNVKTIIV |
| | | | QLAEPVIINCTRPNNNTRESVRIGPGQTFYTSNIIGDIRQAH |
| | | | CNVSKSAWNKTLHVVGEQLEKYFVNKTIKFDRPTGGDLEI |
| | | | TTHSFNCGGEFFYCNTSELFNSTWNSSTQGTNNTELNDTIT |
| | | | LPCRIKQVINMWQRVGQAMYAPPIKGIIKCVSNITGLILTR |
| | | | DGGINSTNGTETFRPGGGDMRDNWRSELYKYKVVQIEPL |
| | | | GVAPTKARRRTVGREKRAIGLGAVFLGFLGAAGSTMGAA |
| | | | SITLTVQARQLLSGIVQQQSNLLRAIEAQQQMLRLTVWGI |
| | | | KQLQARVLAVERYLRDQQLLGIWGCSGKLICTTNVPWNS |
| | | | SWSNKTQEEIWGNMTWLQWDKEISNYTEIIYNLIEKSQNQ |
| | | | QEKNEKDLLALDKWATLWSWFDITKWLWYIKIFIMIVGG |
| | | | LIGLRIVFAVLSVINRVRQGYSPLSFQTHTPNPRGLDRPGGI |
| | | | EEEGGEQDRTRSIRLVSGFLALAWDDLRSLCLFSYHRLRD |
| | | | FVWIAKRTVELLGHSSLKGLRLGWEGLKYLWNLLVYWG |
| | | | LELKKSAINLFDTIAIVVAGWTDRIIEIGQGIGRGILHIPRRIR |
| | | | QGLENFLL |
| A.KE.00. | A | 173 | MRVTGIQKNCQSLWRWGTMILGMLMICSVVGNLWVTVY |
| 00KE | | | YGVPVWKEADTTLFCASNARAYDTEVHNVWATHACVPT |
| | | | DPNPQEIDLENVTEEFNMWKNNMVEQMHTDIISLWDQFL |
| | | | KPCVKLTPLCVTLDCGYNVTNLTSTSNMKEDITNCSYNMT |
| | | | TEIRDRKQKVYSLFYRLDIVPIDEEKNNNSVTSPYRLINCN |
| | | | TSAITQACPKVSFEPIPIYYCAPAGFAILKCKDAEFNGTGPC |
| | | | KNVSTVQCTHGIRPVISTQLLLNGSLAENGTKIRSENITNN |
| | | | AKTIIVQLNETVQINCTRPNNNTRRSVRIGPGQAFYATGGI |
| | | | TGDIRRAYCNVSRQKWEQALKGVVIQLRKHFNNKTITFTN |
| | | | SSGGDVEITTHSFNCGGEFFYCNTSGLFNSTWDNNTDPTN |
| | | | TTSNDTITLQCRIKQFINMWQRTGQAMYAPPIQGVIRCDSN |
| | | | ITGLLLTRDGGVGNNTTETFRPGGGDMRDNWRSELYKYK |
| | | | VVKIEPLGVAPTGAKRRVVEREKRAVGIGAVFIGFLGAAG |
| | | | STMGAASVTLTVQARQLLSGIVQQQSNLLRAIEAQQHLLK |
| | | | LTVWGIKQLQARVLAVERYLRDQQLLGIWGCSGKLICTT |
| | | | NVPWNSSWSNKSQEEIWGNMTWLQWDKEISKYTQTIYDL |
| | | | FEESQNQQEKNEQDLLALDKWANLWTWFDITNWLWYIKI |
| | | | FIMIVGGLIGLRIVFSVLSVINRVRQGYSPLSFQTLTPSPRGL |
| | | | DRLGRIEEEGGERDRDRSIRLVSGFLALAWDDLRNLCLFS |
| | | | YHRLRDFILIAARTVELLGHNSLKGLRLGWEGLKYLWNLL |
| | | | IYWGRELKFSAINLIDTIAIAVAGWTDRIIEAGQRLCRAILN |
| | | | IPRRIRQGAERAWL |
| A.KENY | A | 174 | MRVMGTQRNCQHLLRWGTMILGMIIICSAAENLWVTVYY |
| A | | | GVPVWKNAETTLFCASDAKAYETEKHNVWATHACVPTD |
| | | | PNPQEIHLENVTEEFNMWKNNMVEQMHTDIISLWDQSLK |
| | | | PCVKLTPLCVTLNCSNVNVTATSGTTHGGRGRMKNCSYN |
| | | | ITTELRDRRQKVYSLFYRLDVVPINENNSSNNEYRLINCNT |
| | | | SAITQACPKVTFEPIPIHYCAPAGFAILKCKDKKFNGTGPCT |
| | | | NVSTVQCTHGIKPVVSTQLLLNGSLAEGEVMIRSENITNNA |
| | | | KNIIVQFAEPVKINCTRPNNNTRMSIRIGPGQAFYATGDIIG |
| | | | NIRQAHCNVSRAEWNTTLQKVVTKLREYFGNNKTIKFAN |
| | | | SSGGDLEITTHSFNCGGEFFYCNSSGLFNSTWTNMQESNST |
| | | | ESNDTITLPCRIKIINMWQRAGQAMYAPPIQGIIKCVSNITG |
| | | | LILTRDGGDNNSESETFRPGGGDMRDNWRSELYKYKVVK |
| | | | IEPLGVAPTKAKRRVVEREKRAVGIGAVFLGFLGAAGSTM |
| | | | GAASITLTVQARQLLSGIVQQQSNLLRAIEAQQHLLKLTV |
| | | | WGIKQLQARVLAVERYLRDQQLLGIWGCSGKIICTTNVP |
| | | | WNSSWSNKSQSEIWENMTWLQWDKEISNYTDIIYNLLEES |
| | | | QNQQEKNEQDLLALDKWANLWNWFDISNWLWYIKIFIMI |
| | | | VGGLIGLRIVFTVLSIINRVRQGYSPLSFQTHTPAPRGLDRP |
| | | | ERIEEEGGEQDRDRSIRLVTGFLALAWDDLRSLCLFSYHRL |
| | | | RDFILIATETVELLGHSSLRGLRLGWEGLKYLWNLLLYWG |
| | | | QELKISASNLVDTIAIVVAGWTDRVIEIAQGIGRAILHIPRRI |
| | | | RQGFERALL |
| A.RW.SF | A | 175 | MRVMGIQMNCQNLLRWGTMILGMLIICSATSKLWVTVYY |
| 1703 | | | GVPVWKDAETTLFCASDAKAYEREVHNVWATHACVPTD |
| | | | PDPQEIYLENVTEGFNMWKNNMVEQMHTDIISLWDQSLK |
| | | | PCVKLTPLCVTLNCSHNITTHNITTNNPNITKYMEGEIKNC |
| | | | SYNMTTELRDKKQKVYSLFYKLDVVPIDKNNGNNNIRTQ |
| | | | YRLINCNTSAITQACPKVSFEPIPIHYCAPAGFAILKCNDAE |
| | | | FNGTGPCKNVSTVQCTHGIRPVISTQLLLNGSLAEGRVKIR |
| | | | SENITNNAKTIIVQLNKTVEINCTRPNNNTRKSVRIGPGQAF |
| | | | YATGDIIGDIRQAYCNVSRADWNKTLQGVANQLKSYFSN |
| | | | KTIIFASSSGGDLEITTHSFNCGGEFFYCDTSGLFNSTWGGN |
| | | | STDSIQESNSTESNDTIILPCRIKQIINMWQRVGQAMYAPPI |
| | | | QGVIKCISNITGLLLTRDGGDNNSANETFRPTGGNMRDNW |
| | | | RSELYKYKVVKIEPLGVAPTPAKRRVVQREKRAVGIGAVF |
| | | | IGFLGAAGSTMGAASITLTVQARQLLSGIVQQQSNLLRAIE |
| | | | AQQHLLKLTVWGIKQLQARVLAVERYLKDQQLLGIWGCS |
| | | | GKLICTTNVPWNSSWSNRTQSEIWNNMTWLQWDKEISNY |
| | | | TDIIYNLIEESQIQQEKNEQELLALDKWANLWNWFDISKW |
| | | | LWYIRIFIMIVGGLIGLRIVFAVLSIINRVRQGYSPLSFQIHTP |
| | | | NPRGPDRPERIEEEGGEQGRDRSIRLVSGFLALAWDDLRSL |
| | | | CLFSYHRLRDFILIAARTVELLKRSSLRGLRLGWEGLKYL |
| | | | WNLLLYWGRELKNSAINLLDTIAIAVAGWTDRVIEIGQAI |
| | | | CRAILNIPRRIRQGFERALL |
| A.NG.N | A | 176 | MRARGMQRNWQHWGRWGILFLLIIYSAAENLWVTVYCG |
| G1935 | | | VPVWKDAKTTLFCASDARAYHPEAHNVWATHACVPTDP |
| | | | NPQEIHLENVTEKFNMWKNNMVEQMHEDIISLWDQSLKP |
| | | | CVKLTPLCVTLDCHDLNSSNSSNYTSSNMQGEMTNCSFN |
| | | | MTTELRDKKQKVNAFFYRLDVVQIKENNSTQYRLINCNTS |
| | | | AITQACPKVSFEPIPIHYCAPAGFAILKCNDKKFNGTGPCK |
| | | | NVSTVQCTHGIKPVVSTQLLLNGSLAEEEVVIRSENITNNA |
| | | | KTIIVQLANPVRINCTRPGNNTRKSVRIGPGQTFYATGEIIG |
| | | | DIRQAHCNVNRTEWDSSLQKVATQLRQYFKNTTKIIFTKH |
| | | | SGGDLEITTHSFNCGGEFFYCNTSGLFNSTWDNNNIASSNH |
| | | | TGSNDTITLQCRIKQIINLWQKVGQAMYAPPIPGIIRCESNI |
| | | | TGLLLTRDGGNNNSTNETFRPGGGDMRDNWRSELYKYK |
| | | | VVKIEPLGVAPTKAKRRVVARKKRAVGLGAVFLGFLGAA |
| | | | GSTMGAASIALTVQARQLLSGIVQQQSNLLRAIEAQQHML |
| | | | KLTVWGIKQLQARVLAIERYLKDQQLLGIWGCSGKLICTT |
| | | | NVPWNSGWSNKSQNEIWDKMTWLEWDKEISNYTQLIYTL |
| | | | IEESQNQQEKNEQELLALDKWASLWSWFDISNWLWYIKIF |
| | | | IMVVGGLIGLRIVFAVLSVVRRVRQGYSPLSLQTLIPSPRGP |
| | | | DRPEGIEERGGEQDKDRSIRLVSGFLALAWDDLRSLCLFSY |
| | | | HRLRDFILIAARIVETLGHRGWQGLKYLGNLVQYWSQEL |
| | | | KNSAISLLDTIAIAVAEWTDRVIEIGQRICRAILNIPRRIRQG |
| | | | LERALL |
| A.GM.00 | A | 177 | MKVRGTQRNYAPLWKWGTIFLGLIIICKATENLWVTVYY |
| .N9845.H | | | GVPVWRDAETILFCASDAKAYEKEVHNVRDTHACVPTDP |
| Q385459 | | | NPQEIELENVTEEFNMGKNNMVEQMHTDIISLWDQSLKPC |
| | | | VKLTPICVTLNCHNITTNDTGTGNVTGTGNVTDNNIGEMT |
| | | | NCSFNITTEIRDKRQNVYSLFYKLDVVPINGNGSGNDSEYR |
| | | | LINCNTSTITQACPKVSFEPIPIHYCAPAGFAILKCRDKNFN |
| | | | GTGPCRNVSSVQCTHGIKPVVSTQLLLNGSLAEGDVVIRSE |
| | | | NLTNNAKTIIVQLNESVPINCTRPNNNTRKSVRIGPGQALY |
| | | | ATDIIGNIRQAHCNISKQNWNTALQKIAAQLRQHFYRTINF |
| | | | TKSSGGDLEITTHSFNCRGEFFYCDTSGLFNSIWNSTAISQN |
| | | | VEESNDTITLPCKIRQIVNMWQRVGQAIYARPIQGIINCTSN |
| | | | ITGLLLTRDGGDNDNKTETFRPGGGNMKDNWRSELYRYK |
| | | | VVKIEPLGVAPTKAKRRVVEREKRAVGLGAVIFGFLGAAG |
| | | | STMGAASITLTAQATQLLSGIVQQQSNLLRAIEAQQHLLKL |
| | | | TVWGIKQLQARVLALERYLRDQQLLGIWGCSGKLICTTTV |
| | | | PWNSSWSNKSQNEIWENMTWQWDKEISNYTDHYDLIAES |
| | | | QNQQEKNEKDLLALDKWASLWNWFDISKWLWYIKLFIMI |
| | | | VGGLIGLRIVFTVLSIINRVRQGYSPLSFQTHTPSPGGLDRP |
| | | | ERIEEEGGDRDRDRSTRLVSGFLALVWDDLRSLCLFSYHR |
| | | | LRDFTLIAARTVELLGHSSLKGLRLGWEGLKYLWNLLSY |
| | | | WGRELKSSAITLLNATAIAVAEGTDRVIEVGQRAGRALLH |
| | | | IPRRIRQGWKRALL |
| A.UG.07. | A | 178 | MRVMGIQKNWQHLWKWGTLILGMIMICSTAGNLWVTVY |
| 191845 | | | YGVPVWKDADTTLFCASDAKAYETEKHNVWATHACVPT |
| | | | DPNPQETYLENVTEEFNMWKNNMVEQMHTDIISLWDQSL |
| | | | KPCVKLTPLCVTLHCTDVNVTNTNVTNTNGTSTSSSKVTI |
| | | | NDREEIKNCSFNVTTELRDKEKKVYSLFYKLDVVKIDKNK |
| | | | SDYILINCNTSTITQACPKVSFEPIPIHYCAPAGFAILKCRDI |
| | | | DFNGTGPCKNVSTVQCTHGIKPVVSTQLLLNGSLAEGGIRI |
| | | | RFENITNNAKTIIVQLNSSVPINCTRPNNNTRQSVRIGPGQS |
| | | | FFATGEIIGDIRQAHCNVSKSDWHKTLQQVAEQLEKHFKN |
| | | | KTIIFDQPSGGDLEITTHSFNCGGEFFYCNTAGLFNRNWTW |
| | | | SKENGTRMQNKTDSNGTITLQCRIKQIINMWQRTGQAMY |
| | | | APPIQGVIKCASNITGLLLTRDGGDNKNNSTNSTNQNNTEI |
| | | | FRPIGGDMRNNWRSELYKYKVVKIEPLGVAPTTARRRVV |
| | | | GREKRAVLGGLGAVFLGFLGAAGSTMGAASITLTVQARQ |
| | | | LLSGIVQQQSNLLRAIEAQQHLLKLTVWGIKQLQARVLAV |
| | | | ERYLRDQQLLGIWGCSGKLICPTNVPWNSSWSNKTMSEI |
| | | | WDNMTWLQWDKEISNYTNIIYNLIEESQNQQEKNEQDLL |
| | | | ALDKWASLWNWFDISKWLWYIKIFIMIVGGLIGLRIIFAVF |
| | | | SIINRVRQGYSPLSFQTHPPNPGGLDRPGRIEEEGGEQDRG |
| | | | RSIRLVSGFLALAWDDLRSLCIFSYHRLRDFTLIAERTVELL |
| | | | GHNSLKGLRLGWEGLKYLWNLLVYWGQELKTSAISLFDT |
| | | | LAIVVAGWTDRVIEIGQRLGRGFLHIPRRIRQGLERVLL |
| A.GM.09 | A | 179 | MRVREIPRNCPLLWRWGTMIFWILLICNAEELWVTVFYGV |
| .N05785 | | | PVWRDAETTLFCASDAKAYDTEVHNIWATHACVPTDPNP |
| 6.HQ385 | | | QEIGLENVTEEFNMWKNNMVEQMHTDIISLWDQSLKPCV |
| 453 | | | QLTPLCVTLNCSHNISTTNSTSTGNISTINSTSADMRNCSFN |
| | | | MTTELRDKKQNVYSLFYKLDVVQIGNSSSSEYRLINCNIST |
| | | | ITQACPKVSFEPIPIHYCAPAGYAILKCREKNFNGTGPCTN |
| | | | VSTVQCTHGIKPVVSTQLLLNGSLAEGDVMIRSENITDNA |
| | | | KTIIVQFNESVMINCTRPNNNTRRSVRIGPGQTFYATGEIIG |
| | | | DIRRAHCNVSGEQWRKALQNVKVQLRKYFNTTIEFANSS |
| | | | GGDLEITTHSFNCRGEFFYCDTTGLFNNTEKNDTIMLPCKI |
| | | | RQIVRMWQRVGQAMYAPPIPGVINCLSNITGLLLTRDGGD |
| | | | STNNTEKFRPGGGDIRDNWRSELYKYKVVKIEPLGVAPTK |
| | | | AKRRVVERRKRAGLAAVFLGFLGAAGSTMGAASITLTVQ |
| | | | ARQLLSGIVQQQNNLLKAIEAQQQMLRLTVWGIKQLQAR |
| | | | VLALERYLRDQQLLGIWGCSGKLICTTNVPWNSSWSNKT |
| | | | YNSIWDNMTWLQWDKEINNYTNTIYTLIEKAQNQQEKNE |
| | | | QDLLALDKWASLWNWFDITNWLWYIRIFIMIAGGLIGLRI |
| | | | VFAVLSIINRVRKGYSPLSFQTPTPNPGDLDRPERIEEEGGE |
| | | | QGRDRSIRLVSGFLALVWDDLRSLCLFSYHRLRDLVLLTT |
| | | | RAVELLGHNSLKGLRLGWNVLKQLGNLLSYWGQELKNS |
| | | | AINLLDTIAIAVANWTDRVIEIGQRVGRAICNIPRRIRQGLE |
| | | | RLLL |
| A.CD.97. | A | 180 | MKVRGIQRNSQHLWRWGTLIFWTIIICSAAEKLWVTVYY |
| 97CD | | | GVPVWKDAETTLFCASHANAYEKEQHIVWATHACVPTDP |
| | | | NPLEMDLDNVTEEFNMWKNNMVEQIHDDIIRLWDRSLQP |
| | | | RVKLTPLCVTLDCQPVNSTNNTKVEVPGEMTNCSFNMTT |
| | | | ELSDKKQKVRSLFYRIDLVQIGNNTNDSSNRSLQYRLINCN |
| | | | TSTITQACPKVSFEPVPIHYCAPAGFAILKCKDQEFNGTGP |
| | | | CKNVSTVQCTHGIKPVVSTQLLLNGSLAEGGIKIRSANISY |
| | | | NAKNIIVQLDIPVKINCSRPNNNTRTSVRIGPGQTFYATGDI |
| | | | IGNIRQAHCNLSRTAWNDTLYNVSKALREHFPNKTIIFNKS |
| | | | SGGDLEVTQHMFICGGEFFYCNTSGLFNSSWAPNGSWINN |
| | | | IGSRENDTMTLPCRIKQIINMWQRVEQAMYAPPIKGNITCV |
| | | | SNITGLLLTRDGGTNETRENETFRPIGGEMRDNWRSELYK |
| | | | YKVVKIEPLGVAPTKAKRRVVEGREKRAVGMGAFFLGFL |
| | | | GAAGSTMGAASITLTVQARQLLAGIVQQQSNLLKAIEAQQ |
| | | | HLLRLTVWGIKQLQARVLAVERYLKDQQLLGIWGCSGKL |
| | | | ICTTTVPWNSSWSNKSQDEIWNNMTWMQWDKEINNYTEI |
| | | | IYGLIEESQKQQEKNEFELLELDKWANLWNWFEISNWLW |
| | | | YIKIFIMIVGGLIGLRIVFAVLSIVNRVRQGYSPLSFQTPIPSP |
| | | | EGPDRPGRIEEGGGEQGRTRSIRLVSGFLELAWDDLRSLCL |
| | | | FVYHRSRDFILIAARTVELLGHSSLKGLRLGWEGLKYLWN |
| | | | LLVYWSQELKTSAVSAFNALAITVAEWTDRAIEVGQRIGR |
| | | | AFLNIPRRIRQGFERALL |
| A.TZ.08. | A | 181 | MKVKGIQMNSQHLLRWGIMILGLIIICSAAEKLWVNVYYG |
| CH0175 | | | VPVWKNADTTLFCASDAKAYNPEAHNIWATHACVPTDPS |
| | | | PQEIYLENVTEDFNMWKNNMVEQMHADIISLWDQSLKPC |
| | | | VQLTPLCVTLECKKINITNTTGNNVTANNDTILAREEMRN |
| | | | CSYNMTTELRDKKQKVHSLFYRLDIVEINNNNNGSSNNNS |
| | | | DNDSRPYRLINCNTSAITQACPKISFEPIPIHYCAPAGFAILK |
| | | | CRDKEFNGTGPCKNVSTVQCTHGIKPVVSTQLLLNGSLAE |
| | | | KRVMIRTENITNNAKNIIVQFNESVEINCTRPNNNTRQSVRI |
| | | | GPGQAFYTTEIIGDIRRAYCTVNETKWNQTLYRVAEQLRK |
| | | | YFNNDTTIIFANSSGGDVEITTHSFNCGGEFFYCNTSGLFNS |
| | | | RWENDTQPNNTQPNGTITLPCRIKQIINMWQRTGQAIYAPP |
| | | | IRGVISCQSNITGLLLTRDGGGKNTSDNETFRPGGGDMRD |
| | | | NWRSELYKYKVVKIEPLGVAPNRARRRVVEREKRAVGIG |
| | | | AVFLGFLGAAGSTMGAASMTLTVQARQLLSGIVQQQSNL |
| | | | LRAIEAQQHLLKLTVWGIKQLQARLLAVERYLRDQQLLGI |
| | | | WGCSGKLICATNVPWNSSWSNKSYDEIWGNMTWLQWD |
| | | | KEIDNYTQLIYQLIEDSQNQQEKNEQELLALDKWANLWN |
| | | | WFEISNWLWYIRLFVMIVGGLIGLRIVLAVLSVINRVRQGY |
| | | | SPLSFQTHTPSPGGLDRPRGIEEEGGEQDRGRSIRLVSGFLA |
| | | | LAWDDLRSLCLFSYHRLRDFVLIAARIVELLGHNSLKGLR |
| | | | LGWEGLKYLWNLLAYWGRELKNSAINLLDTIAIAVAGWT |
| | | | DRVIELGQRLCRAFLHIPRRIRQGFERALL |
| A.KE.99. | A | 182 | MKVKGTQRNFQHLLRWGIMVLGMIIICSATEQLWVTVYY |
| 99KE | | | GVPVWKDAETTLFCASDAKAHETEVHNVWATHACVPTD |
| | | | PNPQEIELKNVTEEFNMWKNNMVEQMHTDIISLWDQSLK |
| | | | PCVKLTPLCVTLNCSNFSVTNNSTNNSTNTTTIDNNMQGEI |
| | | | KNCSYNVTTVIRDEKQKVYSLFYRTDVVEIENNSSQYRLI |
| | | | NCNTSAITQACPKVTFEPIPIHYCAPAGFAILKCRNETFNGT |
| | | | GPCNNVSTVQCTHGIRPVVSTQLLLNGSLAEKEIMIRSENIS |
| | | | DNAKSILVQLTRPVIINCTRPNNNTRKSIHIGPGQAFYATG |
| | | | DIIGDIRQAYCTVNRTEWNETLHNVTTQLKTYFNKTIVFTS |
| | | | HSGGDLEITTHTFNCGGEFFYCNTSGLFNSTWDDNIKNDT |
| | | | NSTQGSNSTEIILPCKIKQIVRMWQRTGQAMYAPPIPGVIR |
| | | | CVSNITGLILTRDGGNTSSINETFRPGGGDMRDNWRSELY |
| | | | KYKVVKIEPLGVAPTKARRRVVEREKRAVGIGAVLFGFLG |
| | | | AAGSTMGAASITLTVQARQLLAGIVQQQSNLLRAIEAQQQ |
| | | | MLRLTVWGIKQLQARVLAVERYLRDQQLLGLWGCSGKLI |
| | | | CTTTVPWNSSWSNKSQNEIWNNMTWLQWDKEISNYTQII |
| | | | YDLIEESQNQQEKNEQDLLALDKWANLWSWFDISSWLW |
| | | | YIRIFIMIVGGLIGLRIVFAVLSIIKRVRQGYSPLSFQIHTPNP |
| | | | GEPDRPGEIEEEGGKQDRSRSIRLVSGFLALAWDDLRSLCL |
| | | | FCYHRLRDFILIAARTVELLGHSSLKGLRLGWEGLKYLWN |
| | | | LLVYWSQELKSSAINLFDTLAITVAGWTDRVIEVGQRLCR |
| | | | ALLHIPRRIRQGLERALL |
| A.VI191 | A | 183 | MRVKGIQMNWQHLWKWGTLILGLGIICNAENLWVTVFY |
| A | | | GVPVWKDAETTLFCASDAKAYSEEKHNVWATHACVPTD |
| | | | PDPKEINLVNVTEDFNMWKNKMVEQMQEDIISLWDQSLK |
| | | | PCVKLTPLCVTLECHNSTTPDNNTTQSTIIDETTNCTYNMT |
| | | | TELRDKVQKVHSLFYRLDVVQINGINGTSNNNSAQYRLIN |
| | | | CNTSAITQACPKVSFEPIPIHYCAPAGFAILKCRDKEFNGTG |
| | | | PCRNVSSVQCTHGIKPVVSTQLLLNGSLAEEKIMIRSENFT |
| | | | DNGKTIIVQLVEPVKINCTRPSNNTRKGIHIGPGRAFYATG |
| | | | QITGDIRQAHCNISRTEWNKTLHQVAIQLREHFITKNTTIIF |
| | | | NSSSGGDLEITTHSFNCGGEFFYCSTSGLFNSTWENGTQVA |
| | | | NDTGSNDTITLPCRIKQIVRMWQRVGQAMYAPPIQGMIRC |
| | | | ESNITGLILTRDGVGNNSTNETFRPGGGDMRDNWRSELYK |
| | | | YKVVKIEPLGVAPSRAKRRVVAREKRAVGLGAVFLGFLG |
| | | | AAGSTMGAASLTLTVQARQLLSGIVQQQSNLLRAIEAQHH |
| | | | LLQLTVWGIKQLQARVLALERYLRDQQLLGIWGCSGKLIC |
| | | | PTNVPWNYSWSNKSYDDIWNNMTWLQWDKEIDNYTQLI |
| | | | YGLIEESQNQQEKNEQDLLALDKWASLWSWFDISNWLW |
| | | | YIRIFIMIVGGLIGLRIVFAVLSIINRVRQGYSPLSFQTLPHH |
| | | | QREPDRPEGIEEGGGEQDRGRSIRLVSGFLALAWDDLRSL |
| | | | CLFSYHRLRDFILIVARIVETLGRRGWEALKYLWNLLLYW |
| | | | GRELKISAITLLDATAIAVARWTDRIIEIGQRIVRAILNIPRRI |
| | | | RQGAEKALQ |
| A.CD.97. | A | 184 | MRARGIQRNYQHLWKWGTLIFGMLMICNAVDNLWVTVY |
| 97DC.K | | | YGVPVWREAKTTLFCASDAKTYDQEVHNVWATHACVPT |
| MST91 | | | DPDPQEIDLRNVTEKFNMWKNDMVEQMHTDIISLWDQSL |
| | | | QPCVKLTPLCVTLNCTNITNISNNNNTDSRNITHSEDPAEM |
| | | | RNCSFNVATGIRDRKKKVYSLFYRLDITPINGSDDSKSSGQ |
| | | | YILINCNTSTITQACPKVSFEPIPIHYCAPAGFAILKCKDKQF |
| | | | NGTGTCNNVSPVQCTHGIKPVVSTQLLLNGSLPEGGVIIRS |
| | | | ENITNNAKTIIVQLDEPVRINCTRPNNNTRKGIHIGPGGAFY |
| | | | ATGEVVGNIRHAWCEVNGTAWKEALKKVVTKLKEHFKN |
| | | | KTIAFQPSSGGDLEITTHSFNCRGEFFYCNTSGLFNSTWPG |
| | | | NTSESNVNTTGNITLPCKIKQIINMWQRVGQAMYAPPIPGII |
| | | | QCISNITGLLITRDGGNNDNNVTEIFSPGGGDMRDNWRSE |
| | | | LYKYKVVEIEPLGVAPTKAKRRVVQREKRAVGIGAVFLGF |
| | | | LAAAGSSMGAASMTLTVQARQLLSGIVQQQSNLLKAIEA |
| | | | QQHLLKLTVWGIKQLQARVLAVERYLKDQQLLGIWGCSG |
| | | | KLICTTTVPWNTTWSNKTLTDIWDNMTWLEWDREIRQYT |
| | | | GIIYNLIEESQNQQEKNEQDLLALDKWATLWSWFDISNWL |
| | | | WYIRIFIIIVGGLIGLRIVFAVFSIVKKARQGYSPLSLQILGPN |
| | | | PGGPDRPERIKEEGGEQGRDRSIRLASGFLALVWDDLRSL |
| | | | GICSYHRLRDFVLIATRTVELLGRSSLKGLRLGWEGLKYL |
| | | | WNLLQYWSQELKNSAISLLGAIAIAVAEGTDRVITVGQRIC |
| | | | RAILNIPRRIRQGFERALL |
| A.FI.FIN | A | 185 | MRARGIQRNYQHLLRWGTIILGMILICSTTENLWVTVYYG |
| 91121 | | | VPVWKDAETTLFCASDAKAYDTEMHNVWATHACVPTDP |
| | | | NPQEIYLENVTEEFNMWKNNMVEQMHTDIISLWDESLKP |
| | | | CVQLTPLCVTLNCSNANANSINANATSTNATAENEKGEIK |
| | | | NCSFNMTTELRDKKKKVYSLFYRLDVIPLNGTENETYTEY |
| | | | RLINCNTSAITQACPKVSFEPIPIHYCAPAGFAILKCRDEKF |
| | | | NGTGPCTNVSTVQCTHGIRPVVSTQLLLNGSLAKEEVR1RS |
| | | | ENITNNVKTIIVQLVKPVNITCIRPNNNTRKSIHLGPGRAFY |
| | | | ATGDIIGNIRKAHCIVNESEWNEALQQVATQLGKYFENKTI |
| | | | NFTSPSGGDLEVTTHSFNCGGEFFYCNTSGLFNSTWVSNN |
| | | | TGKYYSNSTRENPNITLPCRIKQIINMWQRAGQAIYAPPIE |
| | | | GVIRCESNITGLLLTRDGGDKNNTSEIFRPGGGNMKDNWR |
| | | | SELYKYKVVKIEPLGVAPTPARRRVVQREKRAVFGLGAVF |
| | | | LGFLGAAGSTMGAASITLTVQARQLLSGIVQQQSNLLRAIE |
| | | | AQQHLLKLTVWGIKQLQARVLAVERYLKDQQLLGIWGCS |
| | | | GKLICTTNVPWNSTWSNKSYSEIWDNMTWMQWDKEISN |
| | | | YTQTIYNLIEKSQIQQEKNEQDLLALDKWTNLWTWFDISN |
| | | | WLWYIKIFIMIIGGLIGLRIVFAVLSAINRVRQGYSPLSFQT |
| | | | HTPNPEGLDRPGRIEEEGGEQGRGRSIRLVSGFLALAWDD |
| | | | LRSLCLFSYHRLKDFILIAARTVELLGHSSLKGLRLGWEGL |
| | | | KYLGNLLLYWGRELRISASDLLDTIAIAVAGWTDRVIEIGQ |
| | | | RIGRAILNIPRRTRQGLERALV |
| A.KE.07. | A | 186 | MRVMGIQRNWQHLLSWGTMVLGMIIICSAVDNLWVTVY |
| 21020 | | | YGVPVWKDAETTLFCASDAKAYETEQHNVWATHACVPT |
| | | | DPNPQEMPLKNVTEQFNMWKNNMVEQMHTDIISLWDQS |
| | | | LKPCVELTPLCVTLNCSTITLNNTDTHSTNNTDIDAMRNCS |
| | | | FNVTTELRDKTKRVYSLFYRLDIVQIDGNNSNGSGEYRLIN |
| | | | CNTSAITQACPKVSFEPIPIHYCAPAGFAILKCNEKEFNGTG |
| | | | PCKNVATVQCTHGIKPVVSTQLLLNGSLAEGKVMIRSENI |
| | | | TDNSKNIIVQFNKTVTINCTRPNNKTKIRSIHIGPGRVFQAT |
| | | | QTGDMRKAFCTVNKTEWDKTLEEVAKQLRAHFNNKTIIF |
| | | | KSSSGGDIEITTHSFNCGGEFFYCNTSGLFNSTWEANSTAN |
| | | | TSTTNITLPCKIKQLVRMWQRTGQALYAPPIEGVIKCVSNI |
| | | | TGLILTRDGGGNNSATNETFRPGGGDMRDNWRSELYKYK |
| | | | VVQIEPLGVAPTEARRRVVKREKRAVPGLFFLGFLAAAGS |
| | | | TMGAASITLTVQARQLLSGIVQQQSNLLRAIEAQQHLLKL |
| | | | TVWGIKQLQARVLTVERYLRDQQLLGIWGCSGKLICTTN |
| | | | VPWNSSWSNKSQTEIWDNMTWLQWDKEISNYTQQIYKLL |
| | | | EESQNQQEQNEQDLLALDKWASLWNWFEISNWLWYIKIF |
| | | | IMIVGGLIGLRIVFAVLSIINRVRQGYSPLSFQTQFPNPAGP |
| | | | GRPGRIEEESGEQDRDRSIRLVSGFLALAWDDLRSLCLFSY |
| | | | HRLRDFILIVARTVELLGHSSLKGLRLGWEGLKYLGNLLIY |
| | | | WGRELKLSAINLFDTIAIVVAGWTDRVIELGQRIVRGFLHI |
| | | | PRRIRQGLERALL |
| A.ZA.07. | A | 187 | MKVRGIQRNWPQWWIWGILGFWVIMMCKGVGNLWVTV |
| SO | | | YYGVPVWREANTTLFCASDAKAYDTEVHNVWATHACVP |
| | | | TDPNPQEIVLENVTENFNMWKNDMVDQMHEDIISLWDQS |
| | | | LKPCVKLTPLCVTLNCTEATFDNNVTDSMKKEMKKCSFN |
| | | | TTTEIRDRKQQAHALFYKLDLVPLNGSSSGYGNYILINCNT |
| | | | STITQACPKVTFEPIPIHYCAPAGFAILKCKDEAFNGTGPCN |
| | | | NVSTVQCTHGIKPVVSTQLLLNGSLAKGGIRIRSKNITNNA |
| | | | QTIIVQLSKPVKINCTRYNNNTRESIRIGPGQTFYTNKVIGD |
| | | | IRQAHCNISETEWNNTLQEVAKQLVVHFPNKTITFAPAAG |
| | | | GDLEITTHSFNCGGEFFYCNTSGLFNDTFMPNNTANSTKN |
| | | | ETQEKNITISCKIKQIIRIWQRVGQAMYAPPIEGLIKCESNIT |
| | | | GILLTRDGGNNTNSTEVFRPGGGNMKDNWRSELYNYKVV |
| | | | KIEPLGVAPTGARRRVVEREKRAVVGLGAVFLGFLGAAG |
| | | | STMGAASLTLTVQARQLLAGIVQQQSNLLQAIEAQQHML |
| | | | KLTVWGIKQLQARVLALERYLQDQQLLGIWGCSGKLICTT |
| | | | TVPWNSSWSNKSQEEIWKNMTWLQWDKEISKYTGIIYTL |
| | | | LQESQSQQEKNEQDLLALDKWASLWNWFDISNWLWYIKI |
| | | | FIMIVGGLIGLRIVFAVISVVNRVRKGYSPLSFQTLTPNQEG |
| | | | LDRLGRIEEEGGEQGRGRSIRLVSGFFSLAWDDLRSLCLFS |
| | | | YHRLRDLLLIAARTVEHLGSSLLKGLRLAREGLNQLWNLL |
| | | | LYWGAEIKNSAISLLDTTAIAVANWTDRVIELGQGIGRAIL |
| | | | HIPRRIRQGFETALL |
| A.TZ.05. | A | 188 | MRVKGTQMNLQHLLKWGTMILGLIIICSAAENLWVTVYY |
| 6592 | | | GVPVWKDAETTLFCASDAKTYDKEVHNVWATHACVPTD |
| | | | PNPQEINLENVTEDFNMWKNNMVDQMHADIISLWDQAL |
| | | | KPCVKLTPLCVTLNCSDSVTTANNSIQNEMKGEIKNCSFN |
| | | | VTTELRDKRQKVYSLFYRLDIVQIDNNNRNSTQYRLINCN |
| | | | TSAITQACPKVSFDPIPIHYCAPAGFAILKCKDENFTGVGPC |
| | | | KNVSTVQCTHGIKPVVSTQLLLNGSLAEKKVMIRSENISN |
| | | | NAKNILVQLTTPVNITCIRPGNNTRKSVHIAPGQAFYATGD |
| | | | IIGDIRQAHCNVNRTQWNNTLKEVANQLRTYFGNETAIIFA |
| | | | SSSGGDLEITTHSFNCRGEFFYCNTSGLFHSTWFNSTWFNS |
| | | | TWEDNQANSINDTIVLPCRIKQIINMWQRAGQAIYAPPIPG |
| | | | EIRCESNITGLMLTRDGGNNNNNRTNETKNETFRPGGGDM |
| | | | RDNWRSELYKYKVVKIEPLGLAPTGAKRRVVEREKRAVG |
| | | | IGAVFLGFLGAAGSTMGAASITLTVQARQLLSGIVQQQSN |
| | | | LLKAIEAQQHLLKLTVWGIKQLQARVLAVERYLKDQQLL |
| | | | GIWGCSGKLICTTTVPWNSSWSNRSQSEIWGNMTWQQWE |
| | | | KEISNYTEEIYRLIENSQNQQEKNEQDLLALDKWASLWN |
| | | | WFDISNWLWYIRLFVIIVGGLIGLRIVLAVFSIINRVRQGYS |
| | | | PLSFQIHTPNPGGLDRPGRIEEEDGEQGKSRSIRLVSGFLAL |
| | | | AWDDLRSLCLFSYHRLRDFILIATRTVELLGHSSLKGLRLG |
| | | | WEGLKYLWNLLACWGRELKIRAINLLDTLAIATANWTDR |
| | | | VIELLQALGRAFLNIPRRIRQGAERAWL |
| A.UA.AF | A | 189 | MKARGMQRNYQHLWRWGTMLFWMIIMCKAAENLWVT |
| 082486 | | | VYYGVPVWRDAETTLFCASDAKAYDKEVHNVWATHAC |
| | | | VPTDPNPQEISLENVTEKFDMWKNNMVEQMQTDIISLWD |
| | | | QSLKPCVKLTPLCVTLNCAEPKSTSSNNSSVNSNSSDSLFE |
| | | | EMKNCSFNMTTELRDKRKTVHSLFYKLDIVSTGNGSGQY |
| | | | RLINCNTSAMTQACPKVTFEPIPIYYCAPAGFAILKCKDTN |
| | | | FTGTGPCKNVSTVQCTHGIKPVVSTQLLLNGSLAEKEVMI |
| | | | RSENITDNSKIIIVQLTEPVNITCIRPGNNTRTSIRIGPGQTFY |
| | | | ATGDVIGDIRKAYCNVSRAAWNSTLQKISTQLRRYFNNKT |
| | | | IIFKNSPGGDLEVTTHSFNCGGEFFYCNTTDLFNSTWDEHG |
| | | | TVTNSTMANGTITLPCRIKQIINMWQRVGQAMYAPPIKGSI |
| | | | RCESNITGLLLTRDGGSGTNSSNETFRPIGGNMRDNWRSE |
| | | | LYKYKVVKIEPIGLARTRAKRRVVEREKRAIGLGAAFLGF |
| | | | LGAAGSTMGAASMTLTVQARQLLSGIVQQQSNLLRAIKA |
| | | | QQHLLKLTVWGIKQLQARVLAVERYLKDQQLLGIWGCSG |
| | | | KLICTTNVPWNSNWSNKSQSEIWDNMTWMQWDREVIYY |
| | | | TDHYDLIEKSQNPQEKNEQDLLALDKWASLWSWFDISNW |
| | | | LWYIKIFIIIVGGLIGLRIVFAVLSIINRARQGYSPLSLQTLTP |
| | | | HPEGPDRPGRIKEEGGEQGRDRSIRLVSGFLALAWDDLRS |
| | | | LCLFSYRRLRDFISITARTVELLGRSSLKGLRLGWEGLKYL |
| | | | GNLLGYWGQELKSSAINLIDTIAIAVAGWTDRVIEIGQRFC |
| | | | RAIRNIPRIRQGAEKALQ |
| A.KE.Q1 | A | 190 | MKVRGIKRNLWKWGTMLLGMLMTYSVAEQLWVTVYYG |
| 68.AF40 | | | VPVWKDAETTLFCASDAKAYSTEKHNIWATHACVPTDPN |
| 7149 | | | PQEIHLESVTEEFNMWKNNMVEQMHTDIISLWDQSLRPCV |
| | | | KLTPLCVTLNCTNVNNNTTNVNNNTGWDEERKNCSFNVT |
| | | | TELRDKRQKVYSLFYKLDVVQIDNSSYRLINCNTSAITQAC |
| | | | PKVTFEPIPIHYCAPAGFAILKCKDEKFNGTGPCKNVSTVQ |
| | | | CTHGIKPVVSTQLLLNGSLAEKEVMIRSENFTNSAKNILVQ |
| | | | FKEPVKINCTRPDNNTRTSIRIGPGQAFYATGIIGDIRQAYC |
| | | | TVNGSEWNKALQKVVEQLRSSFENKTIIFANSSGGDLEITT |
| | | | HSFNCGGEFFYCNTSGLFDSTWNDTDSRQENGTITLPCRIK |
| | | | QIINMWQRTGQAIYAPPIQGAIRCVSNITGLILTRDGGNNN |
| | | | STNETFRPGGGDMRDNWRSELYKYKVVKIEPLGVAPTKA |
| | | | RRRVVGREKRAVGIGAVFLGFLGAAGSTMGAASITLTVQ |
| | | | ARQLLSGIVQQQSNLLKAIEAQQHLLRLTVWGIKQLQARV |
| | | | LAVERYLKDQQLLGIWGCSGKLICTTNVPWNSSWSNKSQ |
| | | | SEIWENMTWLQWEKEISNYTQHYTLIEESQNQQEKNEQDL |
| | | | LALDKWASLWNWFDISKWLWHIRIFIMIVGGLIGLRIVFA |
| | | | VLSVVNRVRQGYSPLSFQTLLPAPRGPDRPDGIEEEGGEQ |
| | | | GRGRSRQLVNGFSTLIWDDLRNLCLFSYHRLRDLILIAARI |
| | | | VELLGRRGWEAIKYLWNLLQYWIQELKNSAISLLNTTAIA |
| | | | VAEGTDRAIEIIQRAITAVLNIPTRIRQGFERALL |
| A.SN.01. | A | 191 | TRVMGIQRNCTPWWRWGIIFLGLIIICKATEKLWVTVYYG |
| DDJ369. | | | VPVWKDAETTLFCASDAKAYEREVHNVWATHACVPTDP |
| AY52163 | | | NPQEIDLENVTEEFNMWKNNMVEQMHTDIISLWDQSLKP |
| 1 | | | CVKLTPLCVTLNCHNVTKTNSNSNSSVKNEMPGEIKNCSY |
| | | | NVTTAIRDKRQNVYSLFYRVDVVPINENSNSSENSSEYRLI |
| | | | NCNTSAITQACPKVTFEPIPIHYCAPAGFAILKCKDKDFNG |
| | | | TGTCRNVSTVQCTHGIKPVVTTQLLLNGSLAEGKVMIRSE |
| | | | NLTNNAKTIIVQLDEPVYINCTRPNNNTRKSVHIGPGQAFY |
| | | | ATGDIIGDIRQAHCNVSREDWNKTLYKVVEQLRKHFNNR |
| | | | TINFTAPSGGDLEITTHSFNCGGEFFYCNTSGLFNSTWYNS |
| | | | TWNNTDSTQKSNGTEKITLPCRIKQVIKMWQRVGQAMYA |
| | | | PPIQGVIKCVSNITGILLTRDGGNLNSSFETFRPGGGNMKD |
| | | | NWRSELYKYKVVKIEPLGVAPTKAKRRVVEREKRAVGLG |
| | | | AVFLGFLGAAGSTMGAASITLTAQARQLLSGIVQQQSNLL |
| | | | RAIEAQQQMLKLTVWGIKQLQARVLAVERYLKDQQLLGI |
| | | | WGCSGKLICTTNVPWNSSWSNKSYSEIWDNMTWLQWDK |
| | | | EISNYTDLIYNLIEESQNQQEKNEQDLLALDKWASLWNWF |
| | | | NISNWLWYIRIFIMIVGGLIGLRIVFTVLSIINRVRKGYSPLS |
| | | | FQTHSPSPGGLDRPRGIEEEGGEQDRDRSIRLVSGFLALAW |
| | | | NDLRSLCLFSYHRLRDFTLIAARTVELLGHSSLKGLRLGW |
| | | | EGLQYLGNLLLYWGRELKNSATSLLDAIAITVAGWTDRVI |
| | | | EVGQRAGRALLHIPRRIRQGLERALL |
| A.UG.07. | A | 192 | MRARGTQKNCQDLWWIWGTMILGMLIICSAAGNLWVTV |
| 191955 | | | YYGVPVWKDAETTLFCASDAKAYSTEKHNIWATHACVPT |
| | | | DPNPQEIDLENVTEKFNMWKNGMVEQMHTDIISIWDQSL |
| | | | QPCVKLTPLCVTLICIDIANDTSRNVTVEMKREIQNCSYNV |
| | | | TTEVRDKKQKVYSLFYKVDIVQISNNSSEYRLINCNTSVIK |
| | | | QACPKVTFEPIPIHYCAPAGYAILKCKDDKFNGTGLCKNV |
| | | | STVQCTHGIKPVVSTQLLLNGSLAEEEVIIRSENINNNAKTII |
| | | | VQLYQPVKINCTRPGNNTRKSVHIGTGQAYFATGDIIGDIR |
| | | | QAYCKVNKSEWNNTLQQVVAQLRKHWNKTIIFNSSSGGD |
| | | | LEITTHRFNCGGEFFYCNTSSLFNSTWWSNNSNNTDSEESN |
| | | | SMGLNDTITLQCRIKQIINMWQRVGQAMYAPPIQGVIRCE |
| | | | SNITGILLTRDGGDNNNESETFRPVGGDMRDNWRSELYKY |
| | | | KVVKIEPLGVAPTEARRRVVGRGKRAVVGMGAMFLGFL |
| | | | GAAGSTMGAASITLTVQARQLLSGIVQQQSNLLRAIEAQQ |
| | | | HLLKLTVWGIKQLQARILAVENYLKDQQLLGIWGCSGRLI |
| | | | CTTNVKWNSTWSNKSKSEIWDKMTWLEWDREISNYTDII |
| | | | YQLIEESQNQQEKNEQDLLALDKWANLWNWFDISNWLW |
| | | | YIKIFIMIVGGLIGLRIVFAVLSVINRVRQGYSPLSFQTHTPS |
| | | | PRDLDRPGRIEEEGGEQGRDRSIRLVSGFLALAWDDLRSL |
| | | | CIFSYHRLRDLLLIAARTVELLGQSSLKGLRLGREKLKYLG |
| | | | NLLLYWGRELRISIINLYDTIAIAVAGWTDRIIEIGQRIGRAI |
| | | | LNIPRRIRQGFERALL |
| A.GM.00 | A | 193 | MRVMGIQKNYALLWRWGTIIFWIMIICNADNNLWVTVYY |
| .N00690 | | | GVPVWKDAETTLFCASDAKAYDQEVHNVWATHACVPTD |
| 9.HQ385 | | | PNPQEIDLENVTEEFNMWKNNMVEQMHTDIISLWDQSLK |
| 444 | | | PCVKLTPLCVTLNCNNITGNATYDMQREISNCSFNITTEIR |
| | | | DKKQKVNSLFYRLDIVPIGDNKSSEYRLINCNTSALTQACP |
| | | | KVTFEPIPIHYCAPAGFAILKCKDKKFNGTGPCKNVSTVQC |
| | | | THGIKPVVSTQLLLNGSLAEEGVMIRSENFTNNAKTIIVQL |
| | | | QEPVKINCTRPNNNTRKGVHIGPGQAFYATGGIIGNISKAR |
| | | | QYVNTTEWIKALKEVNKTLNQQFVNKTLYFNESSGGDLEI |
| | | | TTHSFNCRGEFFYCNTSDLFNSTWLNSTVESNETIILPCKIK |
| | | | QIINMWQRVGQAMYAPPIQGVINCVSNITGILLVRDGGNN |
| | | | NSTAETFRPGGGDMKDNWRSELYKYKVVKIEPLGVAPTR |
| | | | AKRRVVEREKRAVGLGAVFFGFLGAAGSTMGAASITLTV |
| | | | QARQLLSGIVQQQSNLLKAIEAQQHLLKLTVWGIKQLQAR |
| | | | VLAVERYLKDQQLLGIWGCSGKLICTTNVPWNSSWSNKS |
| | | | QDEIWDNMTWLQWDREISNYTSTIYNLLEEAQNQQEKNE |
| | | | QDLLALDQWASLWNWFNITKWLWYIKIFIMIVGGLIGLRI |
| | | | VFAVLTLINRVRQGYSPLSFQTLTHHQREPDRPERIEEGGG |
| | | | EQDRDRSVRLVSGFLALAWDDLRSLCLFSYHRLRDFVLIV |
| | | | VRTVELLGHSSLKGLRLGWEALKYLGNLLSYWGQEIKNS |
| | | | AINLLNTTAIAVANWTDRVIEVGQRAGRALLHIPRRIRQGF |
| | | | ERALL |
| A.TZ.06. | A | 194 | MRVKGIQRNSQHLLRWGTIILGLIIISSAAENLWVTVYYGV |
| 3504 | | | PVWRDADTSLFCASDAKTYKTEVHNVWATHACVPTDPN |
| | | | PQEVYLKNVTENFNMWKNNMVEQMHADIISLWDQSLQP |
| | | | CVKLTPLCVTLDCSYNVTVRPNNTAVNYTTFMKEEMKNC |
| | | | SYNMTTEIRDKKKKVYSLFYRLDVVQIDEIDENNSNNSNN |
| | | | TNNSLYRLINCNTSAITQACPKVSFEPIPIHYCAPAGFAILK |
| | | | CRDKNFNGTGPCRNVSSAQCTHGIRPVVSTQLLLNGSLAE |
| | | | GKEVMIRSENITSNTKNIIVQLTKPVQINCTRPSNNTRTSVH |
| | | | IGPGQAFYTTGEIIGDIRRAHCNVSKAKWNETLGKIAIQLE |
| | | | KHFKNKTIKFNPSSGGDMEITTHMFNCGGEFFYCNTTNLF |
| | | | NSNWTIWNGSAISNGSATANTESNDTVITLQCRIKQIINMW |
| | | | QRAGQAIYAPPIKGVIKCNSNITGLILTRDGGDNNSNIETFR |
| | | | PGGGDMRDNWRSELYKYKVVKIEPLGVAPTRARRRVVQ |
| | | | REKRAAGLGAVFIGFLGAAGSTMGAASITLTVQARQLLSG |
| | | | IVQQQSNLLRAIEAQQHLLKLTVWGIKQLQARVLAVERYL |
| | | | KDQQLLGIWGCSGKLICTTNVPWNSSWSNKSQNEIWDNM |
| | | | TWLEWDKEISNYTRIIYDLIEDSQNQQEKNEQDLLALDKW |
| | | | ASLWNWFDISKWLWYIKIFIIIVGGLIGLRIVCTVLSVINRV |
| | | | RQGYSPLSFQTLAPSPGDRDRPGRIEEEGGEQGRGRSIRLV |
| | | | SGFLALAWDDLRSLCLFSYHRLRDFILIAARTVELLGHNSL |
| | | | KGLRLGWEGLKYLWNLLAYWGRELKISAINLLNTIAIAVA |
| | | | GWTDRVIEIGQRLCRAFINIPRRIRQGFERALL |
| A.SN.96. | A | 195 | MRVMGIQRNYLPLWRWGMIFLGMMIICKATENLWVTVY |
| DDJ360. | | | YGVPVWKDAETTLFCASDAKAYDQEVHNVWATHACVPT |
| AY52163 | | | DPNPQELDLENVTEEFNMWKNNMVEQMHTDIISLWDQSL |
| 0 | | | KPCVKLTPLCVTLNCSNINSTRYDTKDKEEMKNCSFNITTE |
| | | | LRDKRQSVYSLFYKLDVVPINNNSSNNSSNEYRLINCNTSA |
| | | | ITQACPKVSFEPIPIHYCAPAGFAILKCKDKKFNGTGPCRN |
| | | | VSTVQCTHGIKPVVSTQLLLNGSLAEEEVMIRSENLTNNA |
| | | | KTIIVQLVTPVQINCTRPNNNTRTSVRIGPGQAFYATGDIIG |
| | | | KIRQAHCTVRRAQWNTTLQQVADQLRKHFNKTINFTRPS |
| | | | GGDLEITTHSFNCGGEFFYCNTSGLFNSTWNSTTIKQNLTN |
| | | | NDTGVINLPCRIRQIVHMWQRVGQAMYAPPIKGVINCTSN |
| | | | ITGLLLTRDGGDNNSTDEKFRPGGGDMRDNWRSELYKYK |
| | | | VVKIEPLGVAPTRAKRRVVQREKRAVGLGAVFFGFLGAA |
| | | | GSTMGAASITLTAQARQLLSGIVQQQSNLLRAIEAQQHLL |
| | | | KLTVWGIKQLQARVLAVERYLRDQQLLGLWGCSGKLICT |
| | | | TAVPWNSSWSNKSQNEIWENMTWLQWDKEISNYTDIIYN |
| | | | LIEESQNQQEKNEQDLLALDKWANLWNWFDISKWLWYI |
| | | | KIFIMIVGGLIGLRIVFAVLSIINRVRQGYSPLSFQTHTPNPG |
| | | | GLDRPGRIEEEGGEQDRDRSIRLVSGFLALVWDDLRSLCLF |
| | | | SYHRLRDFTLIAARTVELLGQGLKYLWNLLLYWGRELKS |
| | | | SAISLLNATAIVVAEWTDRVIEVGQRAGRALLHIPRRIRQG |
| | | | LERALL |
| A.KE.00. | A | 196 | MRVMGTQRNWQPLLRWGTMILGMLMICSAADNLWVTV |
| 00KE | | | YYGVPVWKDAETTLFCASDAKAYETEKHNVWATHACVP |
| | | | TDPSPQEIPLKNVTEKFNMWKNNMVEQMHTDIISLWDQS |
| | | | LKPCVQLTPLCVTLNCSDVTTNNTKVNTTSAPTTTATVNN |
| | | | DNDMKNCSYNITTELRDKKQKRYSLFYRLDVELINKNNS |
| | | | NSTEYVLINCKTSTLTQACPKVSFEPIPKHYCAPAGFAILKC |
| | | | KDKEFNGTGLCKNVSTVQCTHGIKPVVSTQLLLNGSLVEK |
| | | | RVMIRSANITDNTKNIIVQLKEPVEINCTRPNNNTRKGVHI |
| | | | GLGRRFYTTQVVGDIRQAYCNVSKSKWNDTLKKVVYQL |
| | | | RKYFNKTIIFNSSSGGDVEITTHMFTCGGEFFYCNTSGLFNS |
| | | | TWPVNASEQESNSTESDGIITLRCRIKQIINMWQRTGQAM |
| | | | YAPPIQGIIKCVSNITGLLLTRDGGNSTVNETFRPGGGDMR |
| | | | DNWRSELYKYKVVKIEPLGVAPTKARRRVVGREKRAVGI |
| | | | GAVFLGFLGAAGSTMGAASITLTVQARQLLSGIVQQQNNL |
| | | | LRAIEAQQQLLKLTVWGIKQLQARVLAVERYLRDQQLLGI |
| | | | WGCSEKLICTTNAPWNSSWSNKSQSEIWDNMTWLQWDR |
| | | | EINNYTDIIYRLLEDSQNQQEKNEQDLLALDKWSSLWTWF |
| | | | DLSNWLWYIKIFIMIVGGLIGLRIVFAVLAVINRVRQGYSP |
| | | | LSFQTLTPNPGELDRPGRIEGEGGEQDRGRSIRLVSGFLAL |
| | | | AWDDLRSLCLFSYHHLRDFILIAARIVGLLGRRGWEGLKY |
| | | | LWNLLIYWGQELKTSAVSLLDTIAIVVAGWTDRVLEIGQR |
| | | | IGRAFINIPRRIRQGFERALL |
| A.U455 | A | 197 | MRVMGIQRNYPCLWRWGTMILGLIIICNAQQLWVTVYYG |
| | | | VPVWKDAVTTLFCASDAKAYDAEVHNVWATHACVPTDP |
| | | | NPQEIDLVNVTEEFNMWKNNMVDQMHEDIISLWDQSLKP |
| | | | CVKLTPLCVTLDCHNITINNTNNNTNITDGVREEMKNCSF |
| | | | NMTTELRDKKQKVYSLFYRLDIVQINKTDNNSYRLINCNT |
| | | | STITQACPKVSFEPIPIHYCAPAGFAILKCKDPEFNGKGPCR |
| | | | NVSTVQCTHGIKPVVSTQLLLNGSLAEREIRIRSENFTNNA |
| | | | KTIIVQLVNPVKINCSRPYNTRKNIRRYSIGSGQAFYVTGKI |
| | | | IGDIRQAHCNVSRRDWNRTIQQVAEQLKKKFNNKTIIFASS |
| | | | SGGDIEITTHSFNCGGEFFYCNTSGLFNSIWNGSMSNDMGP |
| | | | NGTITLQCRIKQIINMWQRVGQAMYAPPIQGVIRCESNITG |
| | | | LLLTRDGGTNNTKNETFRPGGGDMRDNWKSELYKYKVV |
| | | | KIEPLGVAPTRAKRRVVEREKRAVGLGAIFLGFLGAAGST |
| | | | MGAASITLTVQARQLLSGIVQQQSNLLRAIEAQQHLLKLT |
| | | | VWGIKQLQARVLAVERYLQDQQLLGIWGCSGKLICTTTV |
| | | | PWNSSWSNKSQEDIWNNMTWLQWEKEISSYTGIIYQLIEE |
| | | | SQNQQEKNELDLLALDKWANLNWFNISNWLWYIRLFVII |
| | | | VGGLIGLRIVFTVLSIINRVRQGYSPLSFQTLAPIPEGLGRPG |
| | | | RIEEEGGEQGKDRSIRLVSGFLAIAWDDLRNLCLFSYHRLR |
| | | | DFALIVARAVELLGRSSLKGLRLGWEGLKYLWNLLLYWG |
| | | | RELKISAITLLDAVAVAVAGWIDRVIEIGQTIGRAILNIPRRI |
| | | | RQGLERALL |
| A.SE.SE | A | 198 | MRVMGTQRNCQHLLNWGIMILGMIIICSTAENLWVTVYY |
| 8131 | | | GVPVWKDAETTLFCASDAKAYEKEVHNVWATHACVPTD |
| | | | PNPQELYLENVTEDFNMWKNNMVEQMHTDIISLWDQSLK |
| | | | PCVQLTPLCVTLNCSNNVTANTNSTSANLTDSVKGEMRN |
| | | | CSFNITTELRDKKKKVYSLFYKLDIVKINKNKSFRGKNSSG |
| | | | NSSSDRYRLINCNTSAITQACPKVSFEPIPIHYCAPAGFAILK |
| | | | CNEDEFNGTGTCRNVSTVQCTHGIRPVVSTQLLLNGSLAK |
| | | | EEVRIRSENISDNAKTIIVQFTKPVEIICTRPNNNTRKSIRIGP |
| | | | GQAFYGMGDIIGDIRKAHCNVSRSKWNETLKKVAIQLRK |
| | | | YWNTTIIFTNSSGGDLEITTHSFNCGGEFFYCNTSGLFNSS |
| | | | WNENDTKVNYNTESNDTITLQCRIKQIINMWQRTGQATY |
| | | | APPIPGVIQCRSNITGLLLTRDGGVTNNTNNETFRPGGGDM |
| | | | RDNWRSELYKYKVVKLEPLGVAPTKAQRRVVKREKRAV |
| | | | GLAAVFFGFLGAAGSTMGAASITLTVQARQLLSGIVQQQN |
| | | | NLLRAIEAQQHMLRLTVWGIKQLQARVMAVERYLKDQQ |
| | | | LLGIWGCSGKIICTTAVPWNSTWSNKSYTQIWDNMTWLQ |
| | | | WDKEISNYTDIIYQLIEESQYQQEKNEKELLELDKWANLW |
| | | | NWFDISNWLWYIKIFIMIVGGLIGLRIVFAVLTVIKRVRQG |
| | | | YSPLSFQIHTPSPRDPDRPGRIEEEGGEQGRDRSIRLVSGFL |
| | | | ALAWDDLRSLCRFSYHRLRDFISIATRIVELLGQGLKYLGN |
| | | | LLLYWIRELKISAISLFDTIAIAVAGWTDRVIEIGQRIGRAIL |
| | | | HIPRRIRQGFERALL |
| A.CD.97. | A | 199 | MKVRGIQRNYQHLWRWGTLIFGIIIICSAAENLWVTVYYG |
| 97CD | | | VPVWKDAETTLFCASDAKAYEREVHNVWATHACVPTDP |
| | | | NPQVMPLADVTEVFNMWMNDMVEQMHEDIISLWDQSLK |
| | | | PCVQLTPLCVTLHCHYVINNTAHKVSVSPEMQEKVANCSF |
| | | | NVTTELRDRKQKVYSLFYREDLVPIDEDKNNSNSASISTSS |
| | | | NSSNCSISDSNSTCINISTYRLINCNTSTITQACPKVSFEPIPI |
| | | | HYCVPAGFAILKCNEKEFNGTGPCKNVSSVQCTHGIKPVV |
| | | | STQLLLNGSLAKETVIIRTENISDNGKNIIVQFVDPVRINCIR |
| | | | PNNNTRTSVRIGPGQTFYTSDIIGDIRQAYCEVNKTQWNM |
| | | | TLQKVADQLRKFFPNKTINFNQTSGGDLEVTTHIFNCRGEF |
| | | | FYCNTSSLFNSSWPINSTTSNNSTASNETIILPCRIIQIINMW |
| | | | QRLGQAMYAPPIKGLINCVSNITGLLLTRDGGDRNSSYETF |
| | | | RPIGGNMKDNWRSELYKYKVVKIEPLGVAPTKARRRVVE |
| | | | REKRAVGIGAFFLGILGAAGSTMGAASITLTVQARQVLSGI |
| | | | VQQQSNLLKAIEAQQHLLKLTVWGIKQLQARVLAVERYL |
| | | | KDQQLLGIWGCSGKLICTTNVPWNSSWSNKSQGEIWDNM |
| | | | TWMQWDREISNYTDIIYKLIEESQEQQEKNELKLLALDQW |
| | | | ASLWNWFDISNWLWYIRIFIMIVGGLIGLRIVFAVLSVVNR |
| | | | VRQGYSPLSFQTLTPSPEGLDRPGKIEEGGGEQDRTRSIRL |
| | | | ASGFLALAWEDLRSLCLFSYHRLRDFILIAARTVELLGHSS |
| | | | LKGLRLGWEGLKYLWNLLTYWCQELKTSAISLFDTLAIA |
| | | | VAEWTDRIIEVGHRIGRAFLNIPRRIRQGFERALL |
| A.SE.UG | A | 200 | MRVMGTQMNWQNLWRWGTMILGIIIICSAAENLWVTVY |
| SE8891 | | | YGIPVWRDAETTLFCASDAKAYDTEVHNVWATHACVPT |
| | | | DPNPQEINLENVTEEFNMWKNNMVEQMHTDIISLWDQSL |
| | | | KPCVKLTPLCVTLNCSSVTNSSVTNITSDMAGEIKNCSFNM |
| | | | TTEIRDKRQKVHALFYRLDVVPMDNNNSLYRLINCNTSAI |
| | | | TQACPKVSFEPIPIHYCAPAGFAILKCNDKEFNGTGPCKNV |
| | | | SSVQCTHGIRPVVSTQLLLNGSLAETEVMIRAENITNNIKNI |
| | | | IVQFNKSVEIICIRPNNNTRKSIRIGPGQAFYATGDIIGDIRQ |
| | | | AYCDVNRTEWNEALQKVVNQLKTHFKNKTIIFNSSSGGD |
| | | | LEITTHSFNCGGEFFYCNTSGLFNSTWNGTDSMQKLNSTG |
| | | | NITLPCRIKQIINMWQRAGQAIYAPPIQGVIRCESNITGLILT |
| | | | RDGGNDNNESEIFRPGGGDMRDNWRSELYKYKVVKIEPL |
| | | | GVAPTKAKRRVVEREKRAIGIGAVFIGFLGAAGSTMGAAS |
| | | | ITLTVQARQLLSGIVQQQSNLLMAIEAQQHLLKLTVWGIK |
| | | | QLQAQVLAVERYLRDQQLLGIWGCSGKLICTTTVPWNSS |
| | | | WSDVSQSEIWENMTWLQWDKEISNYTQIIYSLIEESQNQQ |
| | | | EKNEQDLLALDKWANLWNWFDISKWLWYIKIFIMIVGGLI |
| | | | GLRIVIAVISIINRVRQGYSPLSFQIHTPSPGGLDRPGRIEEE |
| | | | GGEQDRNRSIRLVNGFLALAWDDLRSLCLFCYRRLRDFILI |
| | | | VARTVELLGHSSLRGLRLGWEGLKYLKNLLSYWGRELKL |
| | | | SAINLLDTIAIVIAGWTDRVIEIGQGFCRAIFPRRSKQGLKR |
| | | | ALQ |
| A.GM.05 | A | 201 | MRVMGTQKNCPLLWRWTLIFGLIIICSATGKLWVTVYYG |
| .N33456. | | | VPVWRDAETTLFCASDAKAYDTEVHNVWATHACVPTDP |
| HQ38545 | | | SPQEVDLTNVTENFNMWKNNMVEQMHTDIISLWDQSLKP |
| 2 | | | CVKLTPLCVTLNCSNITSTSSNNNSSNITNASSSSSNNSSNS |
| | | | TVDERNKVMTNCSFNMTTELRDKIQKVHSLFYRSDVVGI |
| | | | NGNKEYRLINCNTSTITQACPKVSFEPIPIHYCAPAGFAILK |
| | | | CKDKEFNGTGPCKNVSSVQCTHGIKPVVSTQLLLNGSLAE |
| | | | EGIRIRSENLTNNAKIIIVQLTKPVRINCTRPYNNTRKSIRIG |
| | | | PGQSWYATGDIIGNIRQAFCNVSKTDWNTALQQVAAQLG |
| | | | RHFNNKKITFKNSSGGDLEITTHSFNCRGEFFYCNTSGLFS |
| | | | GSWYNGTWANDSWSAGPGTNDNITLPCKIKQIIRMWQRV |
| | | | GQAMYAPPIQGEINCVSNITGLLLTRDGGNSSEEIFRPGGG |
| | | | DIRDNWRSELYKYKVVKIEPLGVAPTRARRRVVGREKRA |
| | | | VGLGAVFLGFLGAAGSTMGAASITLTVQARQLLSGIVQQQ |
| | | | SNLLRAIEAQHHLLKLTVWGIKQLQARVLAVERFLKDQQ |
| | | | LLGIWGCSGKLICTTNVPWNSSWSNKSQEQIWNNMTWLQ |
| | | | WDREIDNYTQIIYNLIEESQNQQEKNEQDLLALDKWASLW |
| | | | TWFDISNWLWYIKIFIMIVGGLIGLRIVFAVLSIMNRVRQG |
| | | | YSPLSFQTHTPVVPTGPDRPGRIEEESGEQDRNRSIRLVSGF |
| | | | LALAWDDLRSLCLFSYRHLRDFILIAARAVELLGHSSLKGL |
| | | | RLGWEGLKYLWNLLVYWGRELKNSAISLLDTVAVAVAG |
| | | | WTDRVIEIGQRVGKAIIHIPRRIRQGLERALL |
| A.CM.99 | A | 202 | MRVMGTQRNYPPLWKLGIMVLGMIIICCNAADNLWATV |
| .99CM | | | YYGVPVWKDAETTLFCASDAKAYKTEMHNVWATHACV |
| | | | PTDPNPQEIKLDNVTEEFNMWKNNMVEQMHADIISLWDQ |
| | | | SLKPCVQLTPLCVTLNCSDVKVNTTKNNGTNSSNVLVING |
| | | | TENGQEELKNCSYNVTTELRDKKQRVYSLFYRLDIVPINE |
| | | | DNKSSDNSSGEYRLINCNTSAITQACPKVSFEPIPIHFCAPA |
| | | | GFAILKCRDKNYNGTGLCKNVSTVQCTHGIKPVVSTQLLL |
| | | | NGSLAEGEIKVRSENFTNNAKTIIVQLDQPVIINCTRPNNNT |
| | | | RRSVRIGPGQAYYATGEIIGDIRKAYCTVNKTAWNETKHK |
| | | | VMEKLRGIYHRPIKFNSSSGGDLEITTHMFNCGGEFFYCNT |
| | | | SGLFAQELKNDTNDNNTIILLCKIKQIINMWQRVGQAMYA |
| | | | PPRAGVIRCVSNITGLLLTRDGGKNDNGTNGTEIFRPGGGD |
| | | | MRDNWRSELYKYKVVRIEPVGVAPTRAKRRVVEREKRA |
| | | | VGLGAVFLGFLGAAGSTMGAASLTLTVQARQLLSGIVQQ |
| | | | QSNLLRAIEAQQHMLRLTVWGIKQLQARVLAVERYLRDQ |
| | | | QLLGIWGCSGKLICTTNVPWNSSWSNKSYEDIWDNMTWL |
| | | | QWDKEISNYTALIYDLIEESQNQQEKNEKDLLELDKWASL |
| | | | WNWFSISQWLWYIKIFIMVVGGLIGLRIIFAVLSLVNRVRQ |
| | | | GYSPLSFQTHPPAPVGLDRPGGIEEEGGERGRDRSIRLVSG |
| | | | FLALAWDDLRNLCLFCYHRLRDFILIAARTVELLGRNSLK |
| | | | GLRLGWEGLKYLWNLLAYWGRELKISAINLLDTIAIAVGG |
| | | | WTDSLIELTQRIGRAILHIPRRIRQGFERALL |
| A.KE.09. | A | 203 | MRVMGIQMNYQHLLTWGTIILGMILICSPAENLWVTVYY |
| 1215180 | | | GVPVWREADTTLFCASDAKAYETEKHNVWATHACVPTD |
| 2.HQ540 | | | PNPQEIHLANVTENFDMWKNNMVEQMHTDIISLWDQSLQ |
| 689 | | | PCVKLTPLCVTMNCSEPKFNNTNFNSTGSNSTGIQEEMRN |
| | | | CSFNMTTELKDKKKEVYSLFYRLDIVQIDSKKGNSSDYRLI |
| | | | NCNTSAVKQACPKVSFNPIPIHYCAPAGFAILKCRDEDFNG |
| | | | TGPCKNVSTVQCTHGIMPVVSTQLLLNGSLAKENVQIRSE |
| | | | NISNNAKIILVQLAHPVRINCTRPGNNTRKSIHMGPGQAFY |
| | | | ARGDVIGDIRQAYCNVSSSEWSNTLYKVAEQLRKHYGNE |
| | | | TTIKFTNHSGGDLEVTTHSFNCGGEFFYCNTTNLFNSSIPFN |
| | | | ASERANNTNSTDDIITLQCRIKQIVRMWQRVGQAMYAPPI |
| | | | PGVIRCESNITGLMLTWDGGSKNITEGNRTETFRPGGGDM |
| | | | RDNWRSELYKYKVVKIEPLGVAPTKARRRVVGREKRAVG |
| | | | IGAVFLGFLGAAGSTMGAASVTLTVQARQLLSGIVQQQSN |
| | | | LLRAIEAQQQLLKLTVWGIKQLQARVLALERYLKDQQLL |
| | | | GIWGCSGRLICTTNVPWNSSWSNKSYNEIWDNMTWLQW |
| | | | DREIENYTQIIYGLIEESQNQQEKNEQDLLSLNKWADLWS |
| | | | WFNITNWLWYIKIFIMIVGGLIGLRIVFAVLSVINRVRQGY |
| | | | SPLSFQTHLPNPGGLDRPERIEEEDGEQGRTRSIRLVSGFLA |
| | | | LAWDDLRSLCLFSYHRLRDFILIAARTVELLGHSSLKGLRL |
| | | | GWEGLKYLWNLLVYWGRELKTSAISLVDTIAIVVAGWTD |
| | | | RAIEIGQRIGRAILHIPIRIRQGLERALL |
| B.US.85 | B | 204 | MRVKGIRKNYQHLWRWGTMLLGMLMICSAAEPEQLWVT |
| SFMHS2 | | | VYYGVPVWKEATTTLFCASDAKAYDTEVHNVWATHACV |
| 1 | | | PTDPSPQEVALENVTENFNMWKNNMVEQMHEDIISLWEQ |
| | | | SLKPCVKLTPLCVTLNCTDELNNVTSRIGEKMKGEIKNCSF |
| | | | NITTSIRDKVKKYALFYKLDVVPIDNDNTTTNTTANYRLIN |
| | | | CNTSVITQACPKVSFEPIPIHYCAPAGFAILKCKDKKFNGK |
| | | | GLCTNVSTVQCTHGIRPVVSTQLLLNGSLAGEEVVIRSDNF |
| | | | TNNAKTIIVQLKEAVEINCTRPNNNTRKSIHIQPGRAFYTT |
| | | | GDIIGDIRQAHCNLSKANWNNTLKQIVIKLRQQFNNKTIVF |
| | | | NHSSGGDPEIVMHSFNCGGEFFYCNSTQLFNSTWPFNSTL |
| | | | NDTSTEGNATITLPCRIKQVVNTWQEVGKAMYAPPIRGQI |
| | | | RCSSNITGLLLTRDGGTSENGTNEIEIFRPGGGDMRDNWRS |
| | | | ELYKYKVVKIEPLGVAPTKAKRRVVQREKRAVGTIGAMF |
| | | | LGFLGAAGSTMGAASITLTVQARLLLSGIVQQQNNLLRAI |
| | | | EAQQHLLQLTVWGIKQLQARVLAVERYLRDQQLLGIWGC |
| | | | SGKLICTTAVPWNTSWSNKSLDKIWNNMTWMEWEREID |
| | | | NYTSLIYTLIEESQNQQEKNEQELLELDKWASLWNWFDIT |
| | | | KWLWYIKIFIMIVGGLVGLRIVSTVLSIANRVRQGYSPLSF |
| | | | QTRLPAPRGPDRPEGIEEEGGERDRDRSGRLVNGLLALIW |
| | | | DDLRSLCLFSYHRLRDLLLIAARIVELLGRRGWGILKYWW |
| | | | SLLQYWSQELKNSAVSLLNATAIVVAEGTDRVIEVVQRIY |
| | | | RAFLHIPRRIRPGLERALL |
| B.US.00. | B | 205 | MKVMGTKKNYQHLWRWGIMLLGMLMMSSAAEQLWVT |
| WITO | | | VYYGVPVWREANTTLFCASDAKAYDTEVHNVWATHACV |
| | | | PTDPNPQEVVMGNVTEDFNMWKNNMVEQMHEDIISLWD |
| | | | QSLKPCVKLTPLCVTLHCTNVTISSTNGSTANVTMREEMK |
| | | | NCSFNTTTVIRDKIQKEYALFYKLDIVPIEGKNTNTSYRLIN |
| | | | CNTSVITQACPKVSFEPIPIHYCAPAGFAILKCNNKTFNGK |
| | | | GPCRNVSTVQCTHGIKPVVSTQLLLNGSLAEEDIIIRSENFT |
| | | | NNGKNIIVQLKEPVKINCTRPGNNTRRSINIGPGRAFYATG |
| | | | AIIGDIRKAHCNISTEQWNNTLTQIVDKLREQFGNKTIIFNQ |
| | | | SSGGDPEVVMHTFNCGGEFFYCNSTQLFNSTWFNNGTST |
| | | | WNSTADNITLPCRIKQVINMWQEVGKAMYAPPIRGQIDCS |
| | | | SNITGLILTRDGGSNSSQNETFRPGGGNMKDNWRSELYKY |
| | | | KVVKIEPLGIAPTRAKRRVVQREKRAVTLGAVFLGFLGAA |
| | | | GSTMGAASLTLTVQARLLLSGIVQQQSNLLRAIEAQQHML |
| | | | QLTVWGIKQLQARVLAIERYLKDQQLLGIWGCSGKLICTT |
| | | | TVPWNTSWSNKSYDYIWNNMTWMQWEREIDNYTGFIYT |
| | | | LIEESQNQQEKNELELLELDKWASLWNWFNITNWLWYIK |
| | | | LFIMIIGGLVGLRIVCAVLSIVNRVRQGYSPLSFQTRLPNPR |
| | | | GPDRPEETEGEGGERDRDRSARLVNGFLAIIWDDLRSLCLF |
| | | | SYHRLRDLLLIVARVVEILGRRGWEILKYWWNLLKYWSQ |
| | | | ELKNSAVSLLNVTAIAVAEGTDRVIEIVQRAVRAILHIPTRI |
| | | | RQGFERALL |
| B.CN.RL | B | 206 | MRVTGIRKNYQHLWRWGTMLLGMLMICNAAENLWVTV |
| 42 | | | YYGVPVWKEATTTLFCASDAKAYDTEVHNVWATHACVP |
| | | | TDPNPQEVVLGNVTENFNMWKNNMVEQMHEDIISLWDQ |
| | | | SLKPCVKLTPLCVTLNCTNLKNATNTSSTMEGGEIKNCSF |
| | | | NITTSIKTKVKDYALFYKVDVVPIGNDSTSYRLINCNTSVIT |
| | | | QACPKVSFEPIPIHYCTPAGFAIIKCNNKKFNGTGPCTNVST |
| | | | VQCTHGIRPVVSTQLLLNGSLAEEEVVIKFSNFTDNARVII |
| | | | VQLNESVEIKCIRPNNNTRKSIHLGPGKAWYTTGQIIGDIR |
| | | | QAHCNLSSTKWNNTLKQITKKLREQFGNKTIVFNQSSGGD |
| | | | PEIVMHSFNCGGEFFYCNTSQLFNSTWNDTGTWNDTTGN |
| | | | STITLPCRIKQIVNMWQEVGKAMYAPPIEGQIRCSSNITGLL |
| | | | LTRDGGNNESKPTETFRPGGGDMRDNWRSELYKYKVVKI |
| | | | EPLGVAPTKARRRVVQREKRAVGTIGAMFLGFLGAAGST |
| | | | MGAASITLTVQARQLLSGIVQQQRNLLRAIEAQQHLLQLT |
| | | | VWGIKQLQARVLAVERYLKDQQLLGIWGCSGKLICTTAV |
| | | | PWNASWSNKSLHEIWNNMTWMEWEREIDNYTREIYTLIE |
| | | | ESQNQQEKNELELLELDKWASLWNWFDITKWLWYIKIFI |
| | | | MIVGGLVGLRIVFAVLSIVNRVRQGYSPLSLQTRFPAQRGP |
| | | | GRPEGIEEEGGERDRDRSERLVTGFLSLIWEDLRSLCLFSY |
| | | | HRLRDLLLIVARIVELLGRRGWEVLRYWWNLLQYWIQEL |
| | | | KNSAIGLLNATAIAVAEGTDRVIEVVQRAYRAILHIPTRIR |
| | | | QGLERALL |
| B.CN.06. | B | 207 | MTVMGIRKNCQHWLTWGTMLLGMLIICSAEDLWVTVYY |
| CNHLJS | | | GVPVWKEASTTLFCASEAKAYSTEVHNVWATHACVPTDP |
| M06059. | | | NPQEVVLGNVTENFNMWKNNMVEQMQEDVISLWDESLK |
| EU13179 | | | PCAKLTPLCVTLNCTDWKSNTTNTSSTTNATQSSWENMN |
| 9 | | | GEIKNCSFNVTTQIRNKVRKEQALFNSLDVVPIDNNNSMY |
| | | | MLTNCNTSVITQACPKISFEPIPIHYCTPAGFAIIKCNDKTFN |
| | | | GTGPCTNVSTVQCVHGIRPVVSTQLLLNGSLAEEDMVIRS |
| | | | ENFTNNAKTIIVQLNETVKIECIRPNNNTRKSIQLVGGRSLY |
| | | | ATGDIIGDIRQAHCNVSAQNWTETLKRVAIKLRDQFEHKN |
| | | | KTIFLRPPSGGDPEIVMLTLNCGGEFFYCNTTKLFNHNLTE |
| | | | NNTWQENASESTITLPCRIKQIINRWQEVGRAMYAPPISGQ |
| | | | IKCSSNITGLLLTRDGGKTNGSENGSEIFRPGGGDMRDNW |
| | | | RSELYKYKVVKIEPLGIAPTKAKRRVVQREKRAVGTIGAM |
| | | | FLGFLGAAGSTMGAASMTLTVQARLLLSGIVQQQNNLLR |
| | | | AIEAQQHMLQLTVWGIKQLQARVLAVERYLRDQQLLGIW |
| | | | GCSGKLICTTAVPWNASWSNKSTDEIWGNMTWMQWERE |
| | | | IDNYTELIYTLLEKSQNQQEKNEQELLELDKWANLWSWF |
| | | | DISNWLWYIRIFIMIVGGLKGLRIIFTVFSIVNRVRQGYSPLS |
| | | | FQTRLPAQKGPDRPEETEEGGGERDRGRSTRLVHGFLALI |
| | | | WDDLRSLCLFSYHRLIDLLSIVARIVELLGRRGWEALKYW |
| | | | WNLLQYWSQELKKSAVSLLNATAIAVAEGTDRVIAVIQAI |
| | | | GRAIIHIPRRIRQGAEIALL |
| B.SE.11. | B | 208 | MKVKETRKSCQHLRGILLLGMLMICSAEDQLWVTVYYGV |
| SE60003 | | | PVWKEATTTLICASDAKAYDTEAHNVWATHACVPTNPNP |
| 4.KP411 | | | HEVVLENVTEKFNMWKNNMVEQMHEDIISLWDQSLKPC |
| 825 | | | VKLTPLCVTLHCTNLTNSTTTSISPTMSIQKIKNCSFNTTTS |
| | | | MRDKIEKKHALFYDLDVVQIDNDKNKTNTRYRLRHCSTS |
| | | | TLACAWTNIDSVPIPYCARAAFGIAIRKCKDFDVNGPCPCV |
| | | | NAAQWTPGLKLKVSIPLLLIVILSEGDIDIASDTISDNAKTII |
| | | | VQLNETVQISCTKPNNNTRKSIHIGPGRAFYATGDIIGDIRQ |
| | | | AYCNVSGKAWNKTLGKVVIKLREQFINKTIVFRRSSGGDP |
| | | | EIVLHNFTCGGEFFYWNTTSLFDSTWNTNATWDRNWNDT |
| | | | SGENDIITLPCRIKQIIYMGQEVGKAMYAPPITGLISCSSNIT |
| | | | GLLLIGCGGESYNDEIFTPGGGNMKDYWRSELYKYDVQEI |
| | | | EPLLVAPTKAKRIVVHREKRAFRFGSMFLGFLEAPGSTMG |
| | | | AASITLTVQAILLLSGILHQHSNLLKAIEAHQLLLLVTVSLI |
| | | | SNLQCRIPAEQRQLKYRQLLGICCCSGKIHYAPAAPWNTS |
| | | | WSNRSRDHILHNKTCRQWEKEIDNYTSLIYTLIEESQNQQE |
| | | | KNELDFVELDKWASLRNWFDKSNWLWYIKIFIMIVGVLIG |
| | | | LRIMFAVLSIVNRVRQGSSSLSCQTRFPAPRGPDRPEGIEED |
| | | | GGEQGRDRSIRLVDGFLALIWDDLRSLCLFSYHRLRDLLLI |
| | | | AARVVELLGRRGREILKYWWNLLQYWTQELKKSAISLFN |
| | | | ATAIAVAEGTDRVIELLQRTGRAILHIPVRIRQGLERLLL |
| B.JP.00.1 | B | 209 | MRVRGIRKNYRHLWRWGTMLLGMLMICSAADKLWVTV |
| 17.AB42 | | | YYGVPVWKEAPTTLFCASDAKAYKTEMHNVWATHACVP |
| 8551 | | | TDPNPQEVLLGNMTENFNMWENNMVEQMQEDVISLWDQ |
| | | | SLKPCVELTPLCVTLNCTDYNGNNTNSTHTNSSSSEGEKLE |
| | | | KGEIKNCTFNITTNIGDKQRDYAFFYKLDLEPINKDNASYR |
| | | | LISCNTSVITQACPKVSFEPIPIHYCTPAGFALLKCNDKKFN |
| | | | GTGPCTNVSTVQCTHGIRPVVSTQLLLNGSLAEEEVVIRSA |
| | | | NFSNNGKIIIVQLNETVEINCTRPNNNTRKGIQLGQGRALY |
| | | | ATGDIIGDIRQAYCTINGTKWNKTLNQIAEKLREQFGENKT |
| | | | IKFQPSSGGDPEVVMHSFNCGGEFFYCNTSSLFNWSTNGS |
| | | | NITNGSNITKTIPCRIKQIINMWQKVGKAMYAPPIRGQINCL |
| | | | SNITGLLLTRDGGNQTEFNNTEIFRPGGGDMRDNWRSELY |
| | | | KYKVVKIEPLGVAPTKARRRVVQREKRAVGTIGAMFLGF |
| | | | LGAAGSTMGAASLTLTVQARLLLSGIVQQQNNLLRAIEAQ |
| | | | QHLLQLTVWGIKQLQARVLAVERYLQDQQLLGIWGCSGK |
| | | | LICTTNVPWNSSWSNKTLNQIWENMTWMQWEREIDNYT |
| | | | REIYSLIEEAQNQQEKNEQDLLELDKWDNLWSWFSITKWL |
| | | | WYIKIFIMIVGGLIGLRIVFAVLSIVNRVRQGYSPLSLQTRL |
| | | | PAQRGPDRHEETGEEGGERDRDTSGRLVTGFLALIWDDLR |
| | | | SLFLFSYHHLRDLLLIVARIVELLGRRGWEVLKLWWNLLQ |
| | | | YWSQEIKNSAVSLLNATAIIVAEGTDRIIEIAQRTYRAILHIP |
| | | | TRIRQGLERALL |
| B.CN.12. | B | 210 | MRVTGIRKNYQHLWRWGTLLLGMLMICSAAEKLWVTVY |
| 2097 | | | YGVPVWKDANTTLFCASDAKAYATEVHNVWATHACVPT |
| | | | DPNPQEVVLGNVTENFDMWKNDMVEQMHEDIISLWDQS |
| | | | LKPCVKLTPLCVTLNCTNVRPLNCTDGKPPNCTAVEPSTS |
| | | | GNNSSATGGGEMKNCSFNVTTSIRTKKTYATFYNLDIVKI |
| | | | NDDNDSTSTSYRLINCNTSVITQACPKVSFEPIPIHYCTPAG |
| | | | FAILKCNNKTFNGKGPCTNVSTVQCTHGIRPVVSTQLLLN |
| | | | GSLAEGEVVIRSSNFTDNAKIIIVQLNEPVVINCTRPNNNTR |
| | | | KSIPLGPGQAWYTTGDIIGNIRQAHCNLSRTEWNNTLRQIT |
| | | | KKLREHIGNKTITFNQSAGGDPEIVMHSFNCGGEFFYCNTS |
| | | | QLFNSTWPWNDTSTGNDTTGNSTITLPCKIRQIVNRWQEV |
| | | | GKAMYAPPIAGPISCSSNITGLLLTRDGGNGSADNETFRPG |
| | | | GGDMRDNWRSELYKYKVVQIEPLGVAPTKAKRRVVQRE |
| | | | KRAVGTIGAMFLGFLGAAGSTMGAASITLTVQARQLLSGI |
| | | | VQQQRNLLRAIEAQQHLLQLTVWGIKQLQARVLAVERYL |
| | | | KDQQLLGIWGCSGKLICTTAVPWNASWSNKSLSQIWDNM |
| | | | TWMEWEREINNYTKEIYTLIEQSQNQQEKNELELLELDKW |
| | | | ASLWNWFDITNWLWYIRIFIMIVGGLVGLRIVFAVLSIVNR |
| | | | VRQGYSPLSLQTRFPTQRGPGRPEGIEEEGGEQDRDRSERL |
| | | | ANGFLTLFWEDLRSLCLFSYHHLRDLLLIVARIVELLGRRG |
| | | | WEALKYWWNLLQYWIQELKNRAVSLFNATAIAVAEGTD |
| | | | RVIEVVQRAFRAVLNIPRRIRQGLERSLL |
| B.ES.04. | B | 211 | MRVKGIRKNYQHLWRWGTMLLGLLIICSAAERLWVTVY |
| 357184 | | | YGVPVWKEATVTLFCASDAKAYDTEVHNVWATHACVPT |
| | | | DPNPQEVVLENVTENFNMWKNNMVEQMHEDIISLWDQS |
| | | | LKPCVKLTPLCVTLNCTDWRNATNTTSSSGGTIEGGEIKN |
| | | | CSFNITAGIRDKVQKEYALFYKLDVVPIDNDNSSYRLISCN |
| | | | TSVITQACPKVSFDPIPIHYCAPAGFAILKCNDKKFDGKGP |
| | | | CTNVSTVQCTHGIRPVVSTQLLLNGSLAEEEVVIRSDNFTD |
| | | | NAKTIIVQLNESIEINCTRPNNNTRKSIHIGPGRAFYTTGEIT |
| | | | GDIRQAHCNLSRAKWDNTLKQIADKLRKQLKNKTIVFNQ |
| | | | SSGGDPEIVMHSFTCGGEFFYCNSTKLFNSTWNGTEGSNN |
| | | | SGTRANNSHILTLPCRIKQIINMWQEVGKAMYAPPIRGQIR |
| | | | CSSNITGLLLTRDGGNNNSGTEIFRPGGGDMRDNWRSELY |
| | | | KYKVVKIEPLGVAPTKAKRRVVQREKRAVGIGAVFLGFL |
| | | | GAAGSTMGAASMTLTVQARLLLSGIVQQQNNLLRAIEAQ |
| | | | QHLLQLTVWGIKQLQARVLAVERYLKDQQLLGIWGCSGK |
| | | | LICTTTVPWNTSWSNKSLAEIWNNMTWMEWEREINNYTS |
| | | | LIYNLIEESQNQQEKNEQELLELDKWASLWNWFDITKWL |
| | | | WYIKIFIMIIGGLVGLRIVFTVLSIVNRVRQGYSPLSFQTHLP |
| | | | APRGPDRPEGIEGEDGERDRDRSGRLVGGFLALFWVDLRS |
| | | | LCLFSYHRLRDLLLIVTRIVELLGRRGWEVLKYWWNLLQ |
| | | | YWSQELKNSAVSLLNAAAIAVAEGTDRVIEILQRAGRAIL |
| | | | HIPTRIRQGLERALL |
| B.US.06. | B | 212 | MKVMETRRSWLPLWRGGILLLGILMICSTENLWVTVYYG |
| 7010100 | | | VPVWKEATTTLFCASDAKAYSSEKHNIWATHACVPTDPSP |
| 68 | | | QEIPLENVTENFNMWKNDMADQMHEDIISLWDQSLKPCV |
| | | | KLTPLCVTLNCTNLNCTSSQNHNTTCRNVSKEMEGEIKNC |
| | | | SFYTTTNIRDRVTKNYALFYSLDIVPIDDNNNTNISYRLTSC |
| | | | NTSIITQACPKVSFEPIPIHYCAPAGFAILKCNDQEFNGTGP |
| | | | CKNVSTVQCTHGIRPVVSTQLLLNGSLAEKDIVIRSSNISD |
| | | | NTKTIIVQLKEAIIIDCIRPNNNTRRSIHIGPGRAFYGTGDIIG |
| | | | NIRQAYCSINISKWDETLRQIAGKLGEQLNKTKIITFKNSSG |
| | | | GDPEITMFNFNCGGEFFYCNSTQLFNSIWTKNDNGIWTKN |
| | | | ETNGNWTRSGSTNDNDTIILPCRIRQIINMWQEVGKAMYA |
| | | | PPIRGNISCSSNITGLLLTRDGGNNNDSANETFRPGGGNMK |
| | | | DNWRSELYKYKVVEIEPLGLAPTRAKRRVVQREKRAALG |
| | | | ALFLGFLGAAGSTMGAASVTLTVQARLLLTGIVQQQNNL |
| | | | LKAIEAQQHLLQLTVWGIKQLQARVLSIERYLKDQQLLGI |
| | | | WGCSGKLICTTAVPWNTSWSNKSVDMIWHNMTWMEWE |
| | | | REIDNYTGLIYKLLEASQNQQEQNEQELLELDKWASLWN |
| | | | WFDITNWLWYIKIFIMIVGGLIGLRIVFTVLSIVNRVRKGYS |
| | | | PLSFQTHRPAPRGPDRPEGIEEEGGERDRDTSGPLVTGFLAI |
| | | | IWVDLRNLCLFSYHRLRDLLLIVARIVELLGRRGWEALKY |
| | | | WWNLLQYWIQELKNSAVSLYNTIAIAVAEGTDRIIEVLHRI |
| | | | WRAILNIPRRIRQGLERALL |
| B.CU.14. | B | 213 | MRVKGIRKNYPHWWRWGIMVLGMLMIWSAKEQLWVTV |
| 14CU005 | | | YYGVTVWKGLPVWKNATTTLFCDTELHNVRDKCACVPT |
| .KR9146 | | | DPNPQEVVMGNVTEYFNMWKNDMVEQMHEDIISLWDRS |
| 76 | | | LKPCVIFTPLCVTLNCNDLKNVTNTNCSSGRGIVEKLDISN |
| | | | CSVSISTFITGHVVIADEVMDTDDILLVSIDSINNKLTLCNT |
| | | | SLMTQACRSERCKPIPIHYCAPAGFAILKCNNKTFNGKGPC |
| | | | KNVSTVQCTHGIKPVVSTQLLLNGSLAEEEVVIRSENFTDN |
| | | | TKTIIVQLNESVVINCTRPSNNTRKSIRIHRGPGQAFFATGK |
| | | | IGDIRQAHCNLSRAEWNKTLAQIAKKLGKQFGENKTISFQ |
| | | | PSSGGDIEIVTHSFNCGGEFFYCNTTPLFNSSWYKSNWKSQ |
| | | | RTKEIGGRETITLQCRIKQIVNMWQEVGRAMYAPPIKGQIR |
| | | | CSSNITGVLLTRDGGNTTNHSEIFRPGGGNMKDNWRSELY |
| | | | KYKVVQIEPLGIAPTKAKRRVVQREKRAIGFGAVFLGFLG |
| | | | AAGSTMGAASVTLTVQARQLLSGIVQQQSNLLNAIQAQQ |
| | | | HLLQLTVWGIKQLQARVLAVERYLKDQQLLGIWGCSGKL |
| | | | ICTTAVPWNASWSNKSLEYIWDNMTWMEWEREINNYTR |
| | | | LIYHLIEESQNQQEKNEKELLELDKWASLWNWFDITKWL |
| | | | WYIKIFIMIVGGLIGLRIVFVVLSIINRVRQGYSPLSFQTRHP |
| | | | AQRGPDRPEGIEGEGGERDRGGSERLVDGFLAIIWVDLRS |
| | | | LCLFSYHRLRDLLSILTRIVELLGRRSWEALKYCWNLLQY |
| | | | WSQELKNSAVSLLNATAVAVAEGTDRIIEIVQRACRAFLHI |
| | | | PRRIRQGFERLLL |
| B.US.06. | B | 214 | MRAKEMKKHWQRSWKGGILLLGMLMICSATAPDKWVT |
| CH106 | | | VHYGVPVWREAKTTLFCASDAKAYSTEKHNVWATHACV |
| | | | PTDPNPQEVVLGNVTENFNMWKNDMVEQMHEDIISLWD |
| | | | QSLKPCVKLTPLCVTLNCIDEITNRTNNTHKDGQLMDKGE |
| | | | IKNCSFNTTTSVQDKLQKVSALFYKPDVVRIGDNNNSSNS |
| | | | SSYRLINCNTSIITQACPKVSFEPIPIHYCTPAGFAILKCNDK |
| | | | NFNGSGLCTNVSTVQCTHGIRPVVSTQLLLNGSLAENEVVI |
| | | | KSENFTDNAKTIIVQLKEAVQINCTRPNNNTRKSIHIGPGR |
| | | | AFYATGNIIGDIRKAYCTINITKWNKTLEQIVDKLRDKFGE |
| | | | NKTIVFNSSAGGDPEIVTHSFNCGGEFFYCNTTQLFNSTWN |
| | | | LNSTWNGTKNLNNTTRNDTIILPCRIRQIINLWQKVGKAM |
| | | | YAPPIRGQINCTSNITGLLLTRDGGNTSETNTTEVFRPGGG |
| | | | NMRDNWRSELYKYKVVEIEPIGIAPTKAKRRVVQREKRA |
| | | | VGIGAVFLGFLGAAGSTMGAASVALTVQARQLLSGIVQQ |
| | | | QNNLLRAIEAQQHMLKLTVWGIKQLQARVLAVERYLRDQ |
| | | | QLLGIWGCSGKLICTTAVPWNNSWSNKSLEYIWGNMTW |
| | | | MEWEREIDNYTGLIYNLIEESQLQQEKNEQELLELDKWAS |
| | | | LWNWFDITNWLWYIKIFIMIVGGLVGLRIVFAVLAIANRV |
| | | | RQGYSPLSLQIRPPAQRGPDRPEGIEEEGGDRDRDTSTRLV |
| | | | HGFLALVWDDLRSLCLFSYHRLRDLLLIVTRIVELLGHRG |
| | | | WEALKYWWNLLQYWIQELKSSTVSLFNYTAIAVAEGTDR |
| | | | IIEIVGRVFRAFIHIPRRIRQGLERLLL |
| B.KR.93. | B | 215 | MRVKGIRKNYQHWWRWGIMLLGMWMICSADEMWVTV |
| 93JHS5 | | | YYGVPVWKEATTTLFCASDAKAYDTEVHNVWATHACVP |
| | | | IDPNPQEVELVNVTENFNMWKNNMVEQMHEDIISLWDQS |
| | | | LKPCVKLTPLCVTLNCSNLRNETNIKNATNSSSGKVMEKG |
| | | | EMKNCSFNVTTNIGNKVQKEYALFYKLDVVQIDNTSYTLI |
| | | | NCNSSIITQACPKISFEPIPIHYCTPAGFAILQCNDKKFNGSG |
| | | | PCSNVSTVQCTHGIRPVVSTQLLLNGSLAEEEVVIRSENFT |
| | | | NNAKTIIVQLNASVEINCTRPNNNTRKSIHLGPGSTIYATG |
| | | | DIIGDIRQAHCNISETKWNNTLRQIVIKLREQFGNKTTIVFN |
| | | | QSSGGDPEIVMHSFNCGGEFFYCNTAQLFNSTWIWNDTKG |
| | | | LNKTAENGTFTLPCRIKQIINRWQEVGKAMYAPPIRGQIRC |
| | | | SSNITGLLLTRDGGAESRNGTEIFRPGGGDMRDNWRSELY |
| | | | KYKVVRIEPLGIAPTKARRRVVQREKRAVGTIGAMFLGFL |
| | | | GAAGSTMGAASMTLTVQARLLLSGIVQQQNNLLRAIEAQ |
| | | | QHLLQLTVWGIKQLQARVLAVERYLKDQQLLGIWGCSGK |
| | | | LICTTNVPWNTSSNKSQNEIWDNMTWMQWDREINNYTNL |
| | | | IYTLLEESQNQQEKNEQELLELDKWSNLWNWFSISNWLW |
| | | | YIRIFIMIVGGLIGLRIIFSVLSIVNRVRQGYSPLSFQTHFPSP |
| | | | RGPDRPEGIEGEGGERNRDGSGPLVNGFLTLIWVDLRSLC |
| | | | LFIYRRLRDLLLIVARSVELLGLRGWEVLKYWWNLLHYW |
| | | | SQELKKSAVSLLHATARAVAEGTDRAIEILQRAYRAILHIP |
| | | | RRIRQGLERALL |
| B.US.NL | B | 216 | MRVKEKYQHLWRWGWKWGTMLLGILMICSATEKLWVT |
| 43E9 | | | VYYGVPVWKETTTTLFCASDAPAYDTEVHNVWATHACV |
| | | | PTDPNPPEVVLVNVTENSHMWTNDMVEQMHEDIISLWDQ |
| | | | SLKPCVKLTPLCVSLKCTDLKNDTNTNSSSGRMIMEKGEI |
| | | | KNCSFNIGTSIRDKVQKEYAFFYKLDIVPIDNTSYRLISCNT |
| | | | SVITQACPKVTFEPIPIHYCAPAGFAILKCNNKTFNGTGPCT |
| | | | IVSTVQCTHGIRPVVSTQLLLNGSLAGEDVVIRSANFTDNA |
| | | | KTIIVQLNTSVEINCTRPYNNKRKSIRIQRGPGRAFVTIGKI |
| | | | GNMRQAHCHISRAKWNATLKQIASKLREQFGNNKTIIFKQ |
| | | | SSGGDPEIVTHSFNCGGEFFYCNSTQLFNSTWFNSTWSTEE |
| | | | SNNTEGSDTITLPCRIKQFINMWQKVGKAMYAPPISGQSR |
| | | | CSSNITGLLLTRDGGNNNNGSQIFRPGGGDMRDNWRSELY |
| | | | KYKVVKIDPLGVAPTKAKRRVVQREKRAVGIGALFLGFL |
| | | | GAAGSTMGAASMTLTVQARQSLSGIVHQQNNLLRAIEAQ |
| | | | QHLLQLTVWGIKQLQARILAVERYLKDQQLLGIWGCSGK |
| | | | LICTTAVPWNASWSNKSLEQIWNNMTWMEWDREINNYT |
| | | | SLIHSLIEESQNQQEENEQELLELDKWASLWNWFNITNWL |
| | | | WYIKLFIIIVGGLVGLRIVFAVVSIVNRVRQGYSLLSFQTHL |
| | | | PIPRGPDRPEGIEEEGGERDRGRSIRLVNGSLALIWDDLRSL |
| | | | CLFSYHRLRDLLLIVTRIVELLGRRGWEALKYWWNLLQY |
| | | | WSQELKNSAVNLLNATAIAVAEGKDRVIEVLQAAYRAIR |
| | | | HIPRRIRQGLERILL |
| B.SE.11. | B | 217 | MIVMGIKKNYQHLWTWGMMLLGMLMICSTAPSLWVTV |
| SE60002 | | | YYGVPVWKEATTTLFCASDAKAYEKEAHNIWATHACVPT |
| 3.KP411 | | | DPNPQEVVLENVTEDFNMWKNNMVEQMHEDIISLWDQS |
| 824 | | | LKPCVKLTPLCVTLNCTDPWYDNTANRTTERMIMEKGEIK |
| | | | KCSIEVNTCLIDVWMEHCALLSKLHLVRLENTTFIYMQTS |
| | | | RHSSKRTKGCPRYSIEPIPLQYSAPAGSAILIRKNDMVHGT |
| | | | GTCTHVPPVQCSNGIRPVVSSQHPSHDISGAAVLTKDNFK |
| | | | DTVRTIIVQLNDSVPINCTRPNNNTRKSIHIGPGRAFYATGD |
| | | | IIGDIRQAHCNISLVKWNNTLEKIVTKLREQFKNKTIVFSPP |
| | | | SGGDPEIVSHSFNCGGEFFYCNSTPLFNSTWDTNGTCKGS |
| | | | NSADWNVTVPCISIPITTMGQKLEQAMDVRPIAGKAICSSS |
| | | | LSKGILLANSHNSIIVPRLVMPKGKDKKFNWNRKMYQCQ |
| | | | VQCQIEPLGVAPTMAKRRVVQREKRDLGLGALFLGFLGA |
| | | | AGSTMGAASITLTVQARQLLSGIVQQQNNLLRAIEAQQHL |
| | | | LQLTVWGIKQLQARVLAVERYLKDQQLLGIWGCSGKLIC |
| | | | TTTVPWNISWSNKTLEQIWDNMTWMQWDKEIHNYTELIY |
| | | | TLIEESQIQQEKNEQELLELDKWSNLWNWFDITNWLWYIK |
| | | | IFIMIVGGLIGLRIVFVVLSIINRVRKGYSPLSFQTLLPVPRG |
| | | | PDRRFPIGEGDGERDRDRDSRSANGLLAIINVDMRILSLCIF |
| | | | LYRRDLLLIVMMTVELLGRRGWETLIYCLNLNLYLSQNLK |
| | | | HKAISIINVTATAVAVAADTVIDTVPAAGRGILLILRRIRQG |
| | | | LERDLL |
| B.US.09. | B | 218 | MRVKGIRKNWQHWWWKWGIMLLGMWMICSTEEEKLW |
| 9036 | | | VTVYYGVPVWKEASTTLFCASDAKAHKTEVHNVWATHA |
| | | | CVPIDPDPQEVRLENVTENFNMWKNDMVEQMHEDIISLW |
| | | | DQSLKPCVKLTPLCVTLNCSSNVTIITNSTTANSSGKGIRDE |
| | | | LEMKNCSFNVSTNTNRKGFKEEYALFYKLDLNGTDNTSY |
| | | | TLINCDSSVIKQACPKVTFEPIPIHYCTPAGFAILQCNDKKF |
| | | | NGTGPCSNVSTVQCTHGIRPVVSTQLLLNGSLAEEEIVIRSE |
| | | | NLTDNAKNIIVQLNASVEINCTRPNNNTRKGIGIGPGSIFYA |
| | | | TGAIIGDIRQAHCNISRAKWNNTLRQLAGELEKRFNKTTIIF |
| | | | EQPLPGGDQEIVMHSFNCGGEFFYCNTSQLFNNTWNSTDK |
| | | | TLNNTEGNDTITLPCRIRQIINRWQEVGKAMYAPPIAGIITC |
| | | | SSNITGLILTRDGGTENGTNTTTETFRPGGGNMKDNWRSE |
| | | | LYKYKVVRIEPLGIAPTRARRIVVQREKRAVGTIGAMFLGF |
| | | | LGAAGSTMGAASVTLTVQARLLLSGIVQQQNNLLRAIEAQ |
| | | | QRMLQLTVWGIKQLQARVLAVERYLKDQQLLGIWGCSG |
| | | | KLICTTNVPWNTSWSNKSMNDIWNNMTWMEWDREINNY |
| | | | TGLIQTLLEESQIQQEKNEQELLELDKWTSLWNWFDITKW |
| | | | LWYIRIFIMVVGGLVGLRIIFFVLSIVNRVRQGYSPLSLQTH |
| | | | LPSPRGPDRPGGTEGEGGEEDRGGSGRSVNGFLALIWVDL |
| | | | RSLLLFSYRHLRDLLLILARSVELLGLRRWEALKYCWNLL |
| | | | QYWSQELKNSAVSLLNAIAIAVAEGTDRIIEFLQGVFRAFI |
| | | | HIPRRIRQGLERALL |
| B.KR.04. | B | 219 | MRVKGIMKNYQHWWRWGMMLLGMWMICSANKSWVT |
| 04CWS5. | | | VYYGVPVWKEATTTLFCASDAKAYDTEVHNVWATHACV |
| JQ31613 | | | PIDPNPQEVVLGNVTENFNMWKNNMVDQMHEDIISLWDQ |
| 3 | | | SLKPCVKITPLCVTLNCSNLKNETANSTSANSNETANSTTA |
| | | | SNSTSNSSGEVMEEVDMKNCSFTVTTELKNTVSKQYALFY |
| | | | KCKPYLKNGTGPCSNVSTVQCTHGIRPVVSTQLLLNGSLA |
| | | | EEEVVIRSENFTNNAKNIIVQLNASVEINCTRPDNTIKNIRIG |
| | | | PGIGLGSTLHATKSITGRIRPHCNISEAKWNNTLKQIAIKLR |
| | | | EQFRNKTIIFNHSSGGDPEIEMHSFNCGGEFFYCNTTKLFDS |
| | | | TWNGTKEWNDTKESDKNITLQCRIKQIINRWQEVGQAMY |
| | | | APPISGLIRCSSNITGLILTRDGGANETHTNTETFRPAGGDM |
| | | | KDNWRSELYKYKVVRIEPLGIAPTKARRRVVQREKRAVGI |
| | | | LGAMFLGFLGAAGSTMGAASMTLTVQARQLLSGIVQQQN |
| | | | NLLRAIDAQQHLLRLTVWGIKQLQARVLAVERYLKDQQL |
| | | | LGIWGCSGKLICTTNVPWNTSWSNKTQEDIWTNLTWMQ |
| | | | WEREIDNYTNVIYSLLEESQNQQEKNEQELLQLDKWASL |
| | | | WNWFDITSWLWYIKIFIMIVGGLIGLRIIFTVLSIVNRVRQG |
| | | | YSPLSFQTHFPSPRGPDRPGEIEGEGGEEDRGGSDRLVTGF |
| | | | LTLVWVDLRNLCLFSYRSLRDLILIVARSVELLGLRGWEV |
| | | | LKYCWSLLQYWSQELKKSAVSLLQATARAVVEGTDRVIE |
| | | | TLQRAYRAILHIPRRIRQGLERALL |
| B.DK.04. | B | 220 | MRVKGIRRNWQHWWRWGTMLLGILMICSATDLWVTVY |
| PMVL | | | YGVPVWKEANTTLFCASDAKAYDTEVHNVWATHACVPT |
| | | | DPSPQEVELKNVTEDFNMWKNNMVEQMHEDIISLWDQSL |
| | | | KPCVKLTPLCVTLNCTDWNGTATSPNDNSYRGNKMEKGE |
| | | | MKNCSFNITTGIRDKIQKEYALFYKLDMVPIDDDKTNSSPT |
| | | | TTTSSTLTSSSVTNSNSNSSNTTSNSSQYRNYRMISCNTSVI |
| | | | TQACPKVSFEPIPIHYCAPAGFAILKCNDKNFTGKGPCSNV |
| | | | STVQCTHGIRPVVSTQLLLNGSLAEEGIVIRSDNFSNNAKNI |
| | | | LVQLKEAVVINCTRPNNNTRRGIHIGPGRAFYTTGDVIGDI |
| | | | RQAHCNISGTKWNNTLYQIAKKLKEQYNETNKIIFNHSSG |
| | | | GDPEIVMHSFNCGGEFFYCNTAKLFNSTLNNTEWSNITAE |
| | | | NNEDKIILQCRIKQIINMWQEVGKAMYAPPISGPINCSSSIT |
| | | | GLILTRDGGNINNNSMRDNDTFRPGGGDMRDNWRSELYK |
| | | | YKVVRIEPLGVAPTKAKRRVVQREKRAVGIGAVLLGFLG |
| | | | AAGSTMGAASVMLTVQARQLLSGIVQQQNNLLRAIEAQQ |
| | | | HLLQLTVWGIKQLQARVLAIERYLQDQQLLGIWGCSGRLI |
| | | | CTTAVPWNASWSNRSLDQIWNNMTWMEWEREIDNYTNII |
| | | | YSLIQESQNQQDKNEQELLELDKWASLWNWFSITQWLWY |
| | | | IKIFIMIVGGLIGLRIVFAVLSIVNRVRQGYSPLSLQTLLPAP |
| | | | RGPDRPEGTEEEGGERDRDRSGQLADGLLTLIWVDLRSLC |
| | | | LFSYHRLRDLLLIVARIVELLGRRGWEALKYWWNLLQYW |
| | | | GREIKNSAVSLLNATAIAVAEGTDRVLELLQRIGRGILHIPR |
| | | | RIRQGLERSLL |
| B.US.x.C | B | 221 | MRVKGIRRNYQHLWWKWGIMLLGTLMIYSAAEQWWVT |
| R0317N. | | | VYYGVPVWKEANTTLFCASDAKAYDTEVHNVWATHAC |
| FJ469719 | | | VPTDPSPQEINMTNVTEYFNMWKNNMVDQMHEDIINLW |
| | | | DQSLKPCVELTPLCVTLECTDNITTSSNTTRGSNSSNRSRW |
| | | | ENMTIETGEIKKCSFNVTTGIRDRVNTEYAYFNRFDIVQTE |
| | | | RDNKSYTLRHCNTSVIKQACPKISFEPIPIYYCAPAGFAILK |
| | | | CNNKTFSGKGECDNVSTVQCTHGIRPVVSTQLLLNGSLAE |
| | | | EGVVIRSDNFSDNAKTIIVQLTKAVQINCTRPNNNTRKGIH |
| | | | MGPGKAFFTTGQIIGDIRQAYCNISHTKWNNTLKQVVYQL |
| | | | RKQYGGNKTINFTQPSGGDLEIVTHSFNCGGEFFYCNTTQ |
| | | | LFNTTWYNNETVDNKTWTEDDTNLTDKDIIILPCRIKQIIN |
| | | | MWQKVGKAMYAPPIQGMISCSSNITGLLLTRDGGNDTDT |
| | | | DPNGTETFRPIGGDMRDNWRSELYKYKVVRIEPLGIAPSK |
| | | | AKRRVVQREKRAALGAVFLGFLGAAGSTMGAASITLTVQ |
| | | | ARQLLSGIVQQQSRLLRAIEAQQHMLQLTVWGIKQLQAR |
| | | | VLALERYLQDQQILGIWGCSGKLICTTSVPWNASWGNTSL |
| | | | GYDYIWTNWTWMKWEKEIANYTHIIYDLLEESQIQQEQN |
| | | | ELELMKLDKWASLWDWLGITKWMKYIKIFIIIVVGLVGLR |
| | | | IIFAVLSIVNRVRQGYSPLSFQIRPPAAREPDRPEEIEEGGGG |
| | | | RDRGRSNQLVDGFLALIWVDLWSLCLFSYQRLRDLLLIVT |
| | | | RIVELLGRRGWEILKYWWSLLQYWGQELKKSAVSLLNAT |
| | | | AIAVAEGTDRHEAAQRVFRAIIHIPRRIRQGLERALL |
| B.KR.12. | B | 222 | MRVKGIRKNCQHWWRWGIMLLGMWMICSAATGGLWVT |
| 12KYY1 | | | VYYGVPVWREAITTLFCASDAKAYETEMHNVWATHACV |
| 0 | | | PIDPNPLEVDLPNVTENFNMWKNNMVEQMHEDIISLWDQ |
| | | | SLKPCVKITPLCVVLNCSDAKNSTSTNNSTEKVMEKGEMK |
| | | | NCSFNVTTNIENKVKEARAIFDKLDVVQIDDNDTNTMIGIQ |
| | | | YYKCYSSSITQACPMVSFEPIPIHYCTPAGFAILQCKDKKFN |
| | | | GTGPCTNVSTVQCTHGIRPVVSTQLLLNGSLAEEEIVIRSE |
| | | | NFTNNAKTIIVQLNASVEINCTRPNNNTRKSIPIGPGRAFYA |
| | | | TGDIIGDIRRAHCNISKATWNNTLRQLAIKLREQLEDNTTTI |
| | | | IFKNSSGGDPEIEAHSFNCREEFFYCNTTPLFNSIWYSNNTE |
| | | | KSYNTAENDTITLQCRIRQIIKRWQEVGKARYAPLITCLIRC |
| | | | YSNITGLLLAGDGGEAGKDNGNKNETFRPGGGDMRDNW |
| | | | RSELYKYKVVEIEPLRIAPTRARRIVVQREKRAVGTLGAM |
| | | | FLGFLGAAGSTMGAASLTLTVQAKQVLSGIVRQQNNLLR |
| | | | AIEAQQRLLQLTVWGIKQLQARVLAVERYLQDQRLLGIW |
| | | | GCSGKLICTTSVPWNTSWSNKSHDEIWNNMTWMEWDREI |
| | | | NNYTQVIYDLLEESQIQQEKNEQELLKLDSWASLWKWLDI |
| | | | SNWLWYIQIFMMMVGGLVGLRIILCVLSVVNRVRQGYSP |
| | | | LPFQTHLPSPRGLDRPGGIEGEGGEGDRSGSSGLAGGFLTL |
| | | | VWVDLRSLCLFSYHSLRDLLLIVARSVELLGLRGWEILKY |
| | | | WWSLLQYWSQELKKSAVSLLNATAIAVAEGTDRVIEILQR |
| | | | IYRAILHIPTRIRQGLERALL |
| B.GB.x. | B | 223 | VRGTRKNYHHYLWRWGTMLLGMLMICSAGEQLWVTVY |
| M26864. | | | YGVPVWKEATTTLFCASDAKSYDTEVHNMWATHACVPT |
| U36875 | | | DPNPQEVVLGNVTENFNMWKNNMVEQMHEDIISLWDQS |
| | | | LKPCVKLTPLCVTLNCTDNLDNGTISNATHTTNSSSVNNT |
| | | | TGNSTRKLEIDRGEIKNCSFNITTNIKDKMQKAHALFYKLD |
| | | | VVPIDNSTTSYRLISCNTSVITQACPKVSFEPIPIHFCAPAGF |
| | | | AILKCNNKTFNGKGPCKNVSTVQCTHGIRPVVSTQLLLNG |
| | | | SLAEDEVVIRSENFTDNAKTIIVHLNESVEINCTRPNNKTK |
| | | | RSFHIGPGRAFLTEIVGDIRQAYCNISRAKWNNTLHQVVN |
| | | | KLREQFGNRTIVFKNSSGGDPEIVTHMFNCAGEFFYCNTT |
| | | | KLFNSIWMPNGTWNSTDTSNSTEIRLPCRIKQIVNMWQEV |
| | | | GKAMYAPPISGRIRCVSNITGLLLTRDGGNNNETTEIFRPG |
| | | | GGDMRDNWRSELYKYKLIKIEPLGIAPTKAKRRVVQREK |
| | | | RAVGIGAVLLGFLGAAGSTMGAASLTLTVQARLLLSGIVQ |
| | | | QQNNLLRAIEAQQHMLQLTVWGIKQLQARILAVERYLRD |
| | | | QQLLGIWGCSGKLICPTTVPWNASWSNKNLSQIWDNMTW |
| | | | MEWEREIDNYTSLIYTLIEESQNQQEKNEQDLLELDKWAS |
| | | | LWNWFSITNWLWYIKIFIIIVGGLIGLRMVFTVLSIVNRVR |
| | | | QGYSPLSFQTRHPAPRGPDRPEGIEEEGGERDRDTSGFLVD |
| | | | GFLAIIWVDLRSLCLFSYHRLRDLLLIVARIVELLGRRGWE |
| | | | ALKYWWNLLQYWGKELKSSAISLFNATAIAVAEGTDRVI |
| | | | EVIQRACRAILHIPRRIRQGLERALQ |
| B.US.13. | B | 224 | MRAKGIRKNCQHWWRGVTLLLGMLMICNAAQQLWVTV |
| IQA267. | | | YYGVPVWRDADTILFCASDAKGYDTEVHNVWATHACVP |
| PBMC.S | | | TDPNPQEIRLENVTENFNMWKNKMVEQMHEDIISLWDQS |
| GA1.1.K | | | LKPCVKLTPLCVTLNCTDLNKNSTQGNATAEEQEEIRNCS |
| R182196 | | | FNITTSIRDRMKKDYALFYSNDIVKLDNNTFRLTSCNTSVI |
| | | | TQACPKISFNPIPIHYCAPAGFAILKCKDTTFNGSGLCRNVS |
| | | | SVQCTHGIKPVVSTHFLLNGSLAEKEVVIRSENFTDNAKTII |
| | | | VQLKDPVRINCTRPNNNTRKGIHIGPGRAFYATGDIIGDIR |
| | | | QAHCNISRTEWNKTLNQVVEKLRAQFNNKTIVFKNASGG |
| | | | DPEIVMHIFNCRGEFFYCNTTQLFNSTWNANSTWNDTSSN |
| | | | IGESNDTITLPCKIRQIVNMWQEVGKAMYAPPIAGQLNCSS |
| | | | NITGILLTRDGGESNTTNSNETFRPGGGNMRDNWRSKLYK |
| | | | YKVIKIEPLGLAPTKAKRRVVQRKARAAGLGAVIFGFLGA |
| | | | AGSTMGAASVALTVQARQLLSGIVQQQNNLLRAIEAQQH |
| | | | MLQLTVWGIKQLQARVLAVERYLRDQQLLGIWGCSGKLI |
| | | | CTTAVPWNDSWSPRWSKENMSKIWDNMTWNQWEREID |
| | | | NYTGYIYTLLEESQNQQEKNEQDLLSLDKWADLWSWFDI |
| | | | TNWLWYIKIFIMIVGGLVGLRIIFSVLAIVNRVRQGYSPLSF |
| | | | QTHLPARRGPEGPEEIEEGGGERDRDRSRPLVDGFLTLIWI |
| | | | DLRSLCLFSYHRLRDLLLIVTRTLELLGRRGWEALKYCWN |
| | | | LLQYWGQELRSSAVSLFNATAIAVAEGTDRIIEIIQRIFRAY |
| | | | SFSAPTLKNDMALALG |
| B.US.81. | B | 225 | MRVKEIRKNYQHLWRWGTMLLGILMICSAAEKLWVTVY |
| 81NJ.AY | | | YGVPVWKEATTTLFCASDAKAYDTEVHNVWATHACVPT |
| 247221 | | | DPNPQEVVLENVTENFNMWKNNMVEQMHEDIISLWDQS |
| | | | LKPCVKLTPLCVTLNCTDLRNATNTTSSSGGTMERGEIKN |
| | | | CSFNITTSIRDKVQKEYALFYKLDVVPIDNDNTTTSYRLISC |
| | | | NTSVITQACPKVSFEPIPIHYCTPAGFAILKCKDKKFNGTGP |
| | | | CTNVSTVQCTHGIRPVVSTQLLLNGSLAEEEVVIRSDNFTD |
| | | | NAKTIIVQLKESVEINCTRPNNNTRKSIHIGPGRAFYTTGEII |
| | | | GDIRQAHCNLSRAKWDNTLKQIVRKLREQFGNKTIVFNQS |
| | | | SGGDPEIVTHSFNCGGEFFYCDSTQLFNSTWNVTEGSNNT |
| | | | EGNITLTLPCRIKQIINMWQEVGKAMYAPPIRGQIRCSSNIT |
| | | | GLLLTRDGGNNESETEIFRPGGGDMRDNWRSELYKYKVV |
| | | | KIEPLGVAPTKAKRRVVQREKRAVGIGAVFLGFLGAAGST |
| | | | MGAASMTLTVQARLLLSGIVQQQNNLLRAIEAQQHLLQL |
| | | | TVWGIKQLQARVLAVERYLKDQQLLGIWGCSGKLICTTT |
| | | | VPWNASWSNKSLDKIWNNMTWMEWEREINNYTSLIYTLI |
| | | | EESQNQQEKNEQELLELDKWASLWNWFDITKWLWYIKIFI |
| | | | MIVGGLVGLRIVFAVLSIVNRVRQGYSPLSFQTRLPAPRGP |
| | | | DRPEGIEEEGGERDRDRSGRLVDGFLALFWVDLRSLCLFS |
| | | | YHRLRDLLLIVTRIVELLGRRGWEVLKYWWNLLQYWSQE |
| | | | LKNSAVSLLNATAIAVAEGTDRVIEVLQRTCRAILHIPTRIR |
| | | | QGLERALL |
| B.JP.x.D | B | 226 | MRVKEMRKHWQHLWTGGILLLGMLMICSTAQDAWVTV |
| R1777.A | | | YYGVPVWKEATTTLFCASDAKAYKTEVHNVWATHACVP |
| B604948 | | | TDPNPQEVVLENVTENFNMWKNNMVEQMHEDIISLWDES |
| | | | LKPCVKLTPLCVTLNCTDELIVTNSTNGNNTNSHSTRGND |
| | | | TIGNSTSWKEMKGEIKNCSFNIPTSVKDKMQKQYALFYKL |
| | | | DVVAINDDNNKNSSNYNSSKLSSSNSNCKSDNNSSCNCSS |
| | | | SNNNCSSSNHSSNYSSYILISCNTSTLTQACPKVSFEPIPIHY |
| | | | CTPAGFAILKCNDKRFNGTGPCKNVSTVQCTHGIRPVVST |
| | | | QLLLNGSLAEEEVVIRSENISNNAKTIIVQLNESVAINCTRP |
| | | | NNNTRKGIRIGPGRTFYAAEKIIGDIRKAYCIINGTKWNETL |
| | | | RLIVAKLREQEQIGENTTIIFKPSSGGDPEIENHIFNCRGEFF |
| | | | YCNTTQLFNSTWYSNGTWIGKNFTGSNITLPCRIKQIVNM |
| | | | WQEVGKAMYAPPIRGQINCISNITGLLLTSDGGFRKTNETT |
| | | | NMTETLRPGGGDMRDNWRSELYKYKVVRIEPLGIAPTQA |
| | | | KRRVVQREKRAVGIIGAVFLGFLGAAGSTMGAAALTLTV |
| | | | QARQLLSGIVQQQNNLLRAIEAQHQLLQLTVWGIKQLQA |
| | | | RILAVERYLRDQQLLGIWGCSGKLICTTTVPWNTSWSNKS |
| | | | LTEIWNNMTWMEWEREIENYTGLIYNLLEKSQNQQEKNE |
| | | | QELLELDKWANLWNWFDITNWLWYIRIFIMIVGGLIGLRI |
| | | | VFAVLSIVNRVRQGYSPISLQTHLPVPRGPDRPEGIEGEGG |
| | | | ERDGDTSRRLVIGLLPLIWDDLRSLCLFSYHRLRDLLLIVA |
| | | | RIVELLGRRGWEILKYWWNLLQYWSQELKNSAVSLLNAT |
| | | | AIAVAEGTDRIIEIARTIFRAFYHIPRRIRQGFERALL |
| B.TH.x.3 | B | 227 | MRVKETQMNWPNLWKWGTLILGLVIICSASDKLWVTVY |
| 141A16. | | | YGVPVWRDADTTLFCASDAKAHVTEVHNVWATHACVPT |
| B2.KJ95 | | | DPNPQEIHLENVTEYFNMWKNNMVEQMHEDIISLWDQGL |
| 3175 | | | KPCVKLTPLCVTLTCTNASLTKINTTTSDPKIGNITDEVRN |
| | | | CSFNVTTEIEDKKQRVSALFYKLDIVPMEDNSNSSEYRLIN |
| | | | CNTSVIKQACPKVSFDPIPIHYCTPAGYAILKCNDKNFTGT |
| | | | GQCKNVSSVQCTHGIRPTVSTQLLLNGSLAEEEIMIRTESL |
| | | | TNNAKTIIVHLNKSVEINCTRPSNNTRTSITIGPGRVFYRTG |
| | | | DIIGDIRRAYCEINETNWYKVLKQVTGKLKEHFNKTINFGP |
| | | | PSGGDLEITMHHFTCRGEFFYCNTTKLFINNCTRNETKGGC |
| | | | NSTINGTIILPCRIKQIINMWQGAGQAMYAPPISGRINCVSN |
| | | | ITGILLTRDGGITSNGTNGTNGTNGTETFRPGGGDIRDNWR |
| | | | SELYKYKVVQIEPLGVAPTKARRRVVEREKRAVGIGAMIF |
| | | | GFLGAAGSTMGAASITLTVQARQLLSGIVQQQSNLLRAIE |
| | | | AQQHLLQLTVWGIKQLQARVLAVERYLKDQKFLGLWGC |
| | | | SGKIICTTAVPWNSSWSNKSYDQIWHNMTWIEWEREISNY |
| | | | TNQIYEILTESQNQQDRNEKDLLELDKWASLWNWFDITR |
| | | | WLWYIKIFIMIVGGLIGLRIIFAVLSIVNRVRQGYSPLSFQTP |
| | | | TLHQREPDRPERIEEGGGEQDRDRSVRLVSGFLALAWDDL |
| | | | RSLCLFSYHRLRDFISIAARTVELLGHSSLKGLRLGWEGLK |
| | | | YLGNLLLYWGQELKISAISLLDATAIAVAGWTDRVIEGAQ |
| | | | RAWRAFLHIPRRIRQGLERALQ |
| B.BR.03. | B | 228 | MKVRVIRMSYQQLWKGGTLLLGMLMICSAVGPLWVTVY |
| BREPM1 | | | YGVPVWKEANTTLFCASDAKAYDTEAHNVWATHACVPT |
| 023.EF63 | | | DPDPREVVLENLTEDFNMWKNDMVEQMHQDIISLWDQSL |
| 7057 | | | KPCVKLTPLCVTLNCSDFNGTVTNNSSGNATDNSSGSGLE |
| | | | RETTGEIKNCSFNITTDMKDKVQEKYALFYKLDIVSIDESR |
| | | | NGSSYRLTSCNTSVLTQACPKVSFEPIPIHFCAPAGFAILKC |
| | | | NNKRFNGAGPCTNVSTVQCTHGIRPVVSTQLLLNGSLAEE |
| | | | KVIIRSKNFSDNTKIIIVQLNESVVINCTRPNNNTRKSIHIGP |
| | | | GRAFYGTEIIGDIRKAHCTLNRTQWNNTLQRVATELREQF |
| | | | KNKTIGFTNSSGGDLEITMHSFNCGGEFFFCNTTKLFGGT |
| | | | WDGSTWNWSDNENNTITITLPCRKKLIINMQQEEEKATYA |
| | | | NTIRGPIKSASNITGLLKTRDGGEEDNASETFRPGGGDMRD |
| | | | NWRSELYKYKVVKVVPLGVAPTRAKRRVVQREKDLGLG |
| | | | ALFLGFLGAAGSTMGAASLTLTVQARQLLSGIVQQQNNLL |
| | | | RAIEAQHQLLQLTVWGIKQLQARVLAVERYLRDQQLLGI |
| | | | WGCSGKLICTTSVPWNASWSNKSLDDIWNNMTWMQWE |
| | | | KEIENYTVEIYKLIGEAQNQQEKNEKDLLELDNWASLWN |
| | | | WFSITNWLWYIKIFIMIIGGLIGLRIVFAVLSIVKKVRQGYS |
| | | | PLSLQTRLPTQRGPDRPEGIEEEGGEQDRGSSIRLVDGFLA |
| | | | LIWDDLGSLGPFSYPRLEDLPPIVTRIGELLGRRGWELLKL |
| | | | WWSLLQYWSQELKKSAVSLLNATAIAVAEGTDRILEVVQ |
| | | | RFCRAILHIPVRIRQGLERALL |
| B.US.96. | B | 229 | MRVKGIRKNYQRLWRWGTMLLGMLMICTATGKLWVTV |
| 5155 | | | YYGVPVWKEATTTLFCASDAKSYDTEAHNVWATHACVP |
| | | | TDPNPQELELKNVTEEFNMWKNNMVEQMQEDIISLWDQS |
| | | | IKPCVKLTPLCVTLNCTGLRNNTNATSASSTHPPTTSSSSR |
| | | | NIMEGEMANCSFNITTTMNKVQKEYALFYTHDVVQIVDN |
| | | | DNNNASNSAKKRISYRLISCNTSVVTQACPKVNFEPIPIHY |
| | | | CAPAGFAILKCNEKEFSGKGPCKNVSTVQSTHGIRPVVSTQ |
| | | | LLLNGSLAEKEIVIRSENFTDNTKTIIVQLNEPVKIECTRPN |
| | | | NNTRESITMGPGKAFYATGDIIGNIRKAYCTLRGTEWTNT |
| | | | LKRIAEKLGEKFENKTIKFTQSSGGDPEIVAHSFNCGGEFF |
| | | | YCETTQLFNSTWIRDNGNWTRAENITEGNNITLPCRIRQIV |
| | | | NLWQQVGKAMYAPPISGPINCLSNITGLLLTWDGGNNSTS |
| | | | NNNTEIFRPGGGDMRDNWRSELYKYKVVKIEPLGVAPTK |
| | | | AKRRVVQREKRAVGLGALFLGFLGTAGSTMGAASLTLTV |
| | | | QARQLLSGIVQQQNNLLRAIEAQQHLLQLTVWGIKQLQA |
| | | | RVLAVERYLKDQQLLGIWGCSGKLICTTAVPWNASWSNK |
| | | | SLNDIWDNMTWMQWEREIINYTGLIYTLLVESQIQQEKNV |
| | | | QELLELDTWASLWNWFNITNWLWYIKLFIMIVGGLIGLRI |
| | | | VFTVLSIVNTVTQGYSPLSFQTRLPSQEGTDRPEGIQEGGG |
| | | | ETDRSGPIRLVDGFLAFIWVDLRSLCLFSYHRLRDLLLIVT |
| | | | RTVELLGRRGWELLNYLWNLLQYWSQELLNTAQRLFNTT |
| | | | AIVVAEGTDRVIEVVQRAYRAILHIPTRIRQGLERLLL |
| B.US.SC | B | 230 | MRVKGIRKNCQHLWKWGTMLLGMLIICSAAEQLVTVYY |
| 141 | | | GVPVKEATTTLFCASDAKAYNTEVHNVWATHACVPTNPN |
| | | | PQKVVLKNVTKNFNMKNNMVKQMHKNIISLWDQSLKPC |
| | | | VKLTPLCVTLNCTDYLKNNTNTTSSSEKEMKGGKIKNCSF |
| | | | NITTKIENKVQKKYALFYKLNVVPINNTTTSYRLISCNTSVI |
| | | | TQACPKVSFKPIPIHYCTPAGFALLKCKNKKFNETGPCTNV |
| | | | STVQCTHGIKPVVSTQLLLNKSLAEKKVVIKSKNFTDNAK |
| | | | THVQLNKSVKINCTKPNNNTRKSIHIGPGQALYATEMIENI |
| | | | RQAHCNISKAKNNTLKQIVKKLKVQFRNKTIIFNQSSGGDP |
| | | | KIVMHSFNCGGEFFYCNTTKLFNSTMFNNTNNTKNTKEN |
| | | | GTITLPCRIKQIINRWQKVRKAMYAPPIRGQIKCSSNITGIL |
| | | | LTKNGSTNNSTNKTFRPKEENIRNNKSKLYKYKVVKIKPL |
| | | | KVAPTKAKRRVVQREKKAVETKALFLGFLRAAGSTMGA |
| | | | AAVTLTVQARQLLSGIVQQQNNLLRAIKAQQHLLQLTVGI |
| | | | KQLQAKVLAVKKYLRNQQLLGIGCSEKLICTTTVPNASSN |
| | | | KSLNKINNITMKKKKINNYTSLIYSLIKKSQNQQVKNRQKL |
| | | | LKLNKASLSFNITKWLWYIKIFIIIVKGLIGLKIVFLVLSIVN |
| | | | KVRQKYSPLSFQTRFPAPKEPDRPEGIEEKGKKDKDRSGQ |
| | | | LVNKFLTLIINLRSLCLFSYHRLKNLLLIVAKIVKLLKRRG |
| | | | WEALKYWWNLLQYSQKLKNSAVSLLNATAIAVAEGTDR |
| | | | VIEVVQRTCRAILHIPARIRQGLERALL |
| B.US.02. | B | 231 | MRAKEMRKHWQQWWKGGILLLGMLMICSTAENLWVTV |
| F762P.FJ | | | YYGVPVWKEATTTLFCASDAKAYDTEAHNVWATHACVP |
| 469735 | | | TDPNPQEVFLKNVTENFNMGKNNMVEQMHEDIISLWDQS |
| | | | LKPCVKLTPLCVTLNCTDNIKLKNATENATATKANKEEIIN |
| | | | CSFLVTTDRKDKEQNEYALFYRLDICTNKSWLLLVYTNNT |
| | | | DYRLDSCNTSVITPSGPRRCPCESISIHPCTLDDCAIFKCNE |
| | | | KKCNGTGVCKTVSTVHCIHGLSAVGSSPLLLNGSLAEEEV |
| | | | VIRSENFTNNAKTIIVQLKEAVTINCTRPNNNTRKGIHIGPG |
| | | | RAFYATESIIGDIRQAHCNLSRAQWNNTLRQIVQKLKEQF |
| | | | KNATTIKFNSSSGGDPEIVTHSFNCGGEFLYCNTSHLFNST |
| | | | WMCNSTWNSTNTEGNNTITLPCRIKQIVNMWQEVGKAM |
| | | | YAPPIKGQIKCLSNITGLLLTRDGGVGDDSSNDTEIFRPGG |
| | | | GDMRDNWRSELYKYKVVRIEPLGIAPTKAKRRVVQREKR |
| | | | AVGTLGAMFLGFLGAAGSTMGAASVTLTVQARQLLSGIV |
| | | | QQQNNLLRAIEAQQHLLQLTVWGIKQLQARVLAVERYLW |
| | | | DQQLLGIWGCSGKLICPTTVPWNTSWSNKNYTEIWNKMT |
| | | | WMQWEREIDNYTSLIYSLIEESQNQQEKNEQELLELDKWD |
| | | | SLWSWFSITHWLWYIKIFIMIVGGLVGLRIVFTVLSIVNRV |
| | | | RQGYSPLSFQTHLPAQRGPDRPEGIEEEGGERDRERSTRLV |
| | | | HGLLALIWDDLRSLCLFSYHRLRDLLLIVARTVELLGRRG |
| | | | WEALKYLWNLLQYWIQELKKSAISLLNATAIAVAEGTDRI |
| | | | IEIAQRIFRAFLHIPRRIRQGFERALQ |
| B.CN.12. | B | 232 | MKVTGIRRNYQKFWRWGALLLGMLMISSAAEKLWVTVY |
| 2019 | | | YGVPVWKDANTTLFCASDAKGYKTEAHNVWATHACVPT |
| | | | DPNPQEVVLANLTENFNMWESDMVEQMHEDVINLWDQS |
| | | | LKPCVKLTPLCVTLNCTNLNITSNNTSSSNTSSSNTSSITGG |
| | | | GEMKNCSFNITTSINTKVKDYAFFYNLDIVQINNDKTSDNT |
| | | | SYRLINCNTSVITQACPKISFEPIPIHYCTPAGFAIIKCNNETF |
| | | | NGTGPCTNVSIVQCTHGIRPVVSTQLLLNGSLAERDVAIRS |
| | | | KNFSNNAENIIVQLNEAVQINCTRPNNNTRKSINIGPGRAW |
| | | | YTTGEIIGNIRQAHCNISGSKWNDTLKQVVKKLREQFKNK |
| | | | TITFEQPPPGGDPEIVMHNFNCGGEFFYCNTSQLFNSRWDD |
| | | | VDENETSTSNGTTGNDTITLPCRIKQIINMWQEVGKAMYA |
| | | | PPIAGLIRCSSNITGLLLTRDGGNINATGNNTNKNNNTEIFR |
| | | | PAGGNMKDNWRSELYRYKVVKVEPLGVAPTRAQRRVVQ |
| | | | REKRAVGMIGAMFLGFLGTAGSTMGAASLTLTVQARQLL |
| | | | SGIVQQQRNLLRAIEAQQHLLQLTVWGIKQLQARVLAVER |
| | | | YLKDQQLLGLWGCSGKLICTTNVPWSGNWSSKSYNDIWY |
| | | | NMTWMQWEKEIENYTGVIYTLIEESQNQQEKNEQELLEL |
| | | | DKWASLWNWFDISNWLWYIRIFIMIVGGLIGLRIIFAVLSIV |
| | | | NRVRQGYSPLSLQTHFPTQRGPGRPEGTEEEGGERDRDRS |
| | | | ERLVTGFLTLFWEDLRSLCLFSYHRLRDLLLIVARIVELLG |
| | | | RRGWEVLRYWWNLLQYWIQELKNSAISLLNAIAIAVGEG |
| | | | TDRVIEVAQRIYRAILNIPRRIRQGLERALL |
| B.SE.03. | B | 233 | MRVKGIRKNCQHSWKWGIMLLGMLMICNASDQLWVTV |
| 005SE.M | | | YYGVPVWKEANTTLFCASDAKAYDTEVHNVWATHACVP |
| F373127 | | | TDPNPQEIGLGNVTENFNMWKNNMVEQMHEDIISLWDQS |
| | | | LKPCVKLTPLCVTLNCTDCKKDNDTLQCDCNNERLIIILSL |
| | | | VTYTWERGEIRNCSVTATTDIEDRRKNEDASYHNRGIIQIN |
| | | | NINNTYTLMLSSCTTSIIAGPCPSVSLDPIPNCYCAAAGFPIR |
| | | | NGNDNNVAGPGPSDIVTPGPCALGIMPVAPPLLLVSGPLA |
| | | | EEEVITTSDIFTNNAKTIIVQLNETVKINCTRPSNNTRKSITI |
| | | | GPGRAFYATGDIIGDIRQAHCNISQAKWNNTLKQVVVKLR |
| | | | EQFGMNKTIIFNQSSGGDPEIVMHSFNCGGEFFYCNTTRLF |
| | | | NTTWNNTEKSNPTEGNGTITLQCRIKQIINLWQEVGKAMY |
| | | | APPIRGQINCSSNITGLLLTTDGGMNTSNNKTFIPAGGDMR |
| | | | DYWRSGVLKYDVVIVEPLGIAPTTDMRRVVQIQKRAELLR |
| | | | ALLLVFLGAAGRTMSAASMTLTVQARQLLSGIVQQQNNL |
| | | | LQAIEAQQHMLKLTVWGIKQLQARILAVERYLQDQQFLG |
| | | | FWGCSGKRICTTAVPWNASWSNKSLDEIWNNMTWMEWE |
| | | | KEIDNYTGLIYNLLIESQNQQEKNEQELLALDKWASLWN |
| | | | WFDISNWLWYIRIFIMIVGGLVGLRIVFTVLSIVRRVRQRY |
| | | | SPISVQTPRSAAQRGHDRPDGIEEEGGERDRDRFDQSVNGF |
| | | | LTIIWVDVRSLCLFSYHRLRDLLSIVSRIVELMGRRGWGIL |
| | | | KYWCNLLQYRSQELKKSAVSLFNATAIVVAEGTDRVIEAI |
| | | | QRAFRAILHIPRRIRQGAERALI |
| B.SE.10. | B | 234 | MRVKGIKEELSSSWWKWGIMLLGMLMMICSALDQLWVT |
| SE60001 | | | VYYGVPVWKEATTTLFCASDAKAYDTEVHNVWATHACV |
| 2.KP411 | | | PTDPNPQEVVLENVTENFNMWKNNMVDQMHEDIISLWD |
| 823 | | | QSLKPCVKLTPLCVTLNCTDLRNNTESNDTTSGMILGKDK |
| | | | IKMILFNCSFNITTSRRDKWQQEYAFFYKLDIMPIDEENNT |
| | | | NTYTLISCNTSVITQACPKVSFEPIPIHYCTPAGFALLKCND |
| | | | KKFNGTGLCKNVSTVQCTHGIRPVVSTQLLLNGSLAEEEV |
| | | | VIRSENFTDNIKTIIVQLNESVEINCTRPNNNTRRSIRNHRGP |
| | | | GRAFHTTGEIIGNIRQAHCNISRAKWNNTLKQIVAKLREQF |
| | | | GKNKTIVFNHSSGGDPEIVMHSFNCGGEFFYCNTTQLFNST |
| | | | WNITGGLNNTEGNGTITLQCKIKQFINMWHEVGKAMYAP |
| | | | PIRGQITCSSNITGLLLTRDGGENPGNDTDTFTPGGGDMKD |
| | | | NWSSELDKYRVIGIAPLPVAPTKAKTRLLQRDKRAVGIGS |
| | | | VFLVFLVAAGSTMSAMSMTMTLQAQELLYVTERMQKNL |
| | | | LKAIEAQQHLLQLTVWGIKQLQARVLAIEGYLKDQQLLGL |
| | | | WGCSGKLICTTAVPWNVSWSNKSLDKIWNNMTWREWER |
| | | | EIDNYTGLIYNLLETSQNQQEKNEQELLELDKWASLWNW |
| | | | FDITNWLWYIKIFIMIVGGLVGLRIVFTVLSIVNRVRQGYSP |
| | | | ISLQTPRPAQRGLDRPEAWDEKAGEKCRGHFHRCVNRIM |
| | | | AIFGAICGAFCSSSFSCDPLGFYWGFWKFLPGGGKPLKNA |
| | | | WNFLPYLVPELNQGANEVFNCPVNATGESTGRGIETFQRT |
| | | | FKSIFQILSQITPGQTGAKKGWV |
| B.SE.10. | B | 235 | MRVQENWQNLWKGGIWFLGIWMICSAVEQLWVTVYYG |
| SE60004 | | | VPVWKDATTTLFCASNAKAYDTEVHNVWATHACVPTDP |
| 6.KP411 | | | NPQEVVLQNVTEPFNVWKNGMVEQMHEDIISLWDQSLKP |
| 827 | | | CVKLTPLCVTLHCTDLKETIKEEKGKMKNCSFNTTTSIRD |
| | | | KTQTAYALFSTLDLVQIKDGKINANSKHSYRIIHCNTSTITQ |
| | | | ACPKVSFEPIPIHYCAPAGFAILKCNDKQFNGTGECRNVSS |
| | | | VQCTHGIRPVVSTQLLLNGSLAEEDIVIRSENLTNNAKTIIV |
| | | | QLNETVRINCTRPNNIVSRRIHIGPGRTFHATKSITGSIKQAF |
| | | | CNLSRPQWEDTLGKIVKKLRQNFGTNTTIVFDHSSGGDPEI |
| | | | VKDRINCGGKFFYCYSIKLFKSTWNMEWSTQKASNTENE |
| | | | NITLPCKIKQVINMWQEVGKAMYAPPIEGQIKCSSNITGLL |
| | | | LTRDGGKHNSSDTNKTEIFRPGGGDMRDNWRSELYKYKV |
| | | | VKIEPLGIAPTRAKRRVVQREKRAVGLGAMFLGFLGAAGS |
| | | | TMGAASLTLTVQARQLMSGIVQQQNNLLRAVEAQQHML |
| | | | QLTVWGIKQLQARVLAVERYLKDQQLLGIWGCSGRLICT |
| | | | TAVPWNTSWSNRTQDDIWTNLTWMKWEKEIDNYTDVIY |
| | | | RLLEESQNQQEKNEQELLELDKWASLWSWFDITNWLWYI |
| | | | KIFIMIVGGLIGLKIVFTVFSIVNRVRQGYSPVLLQTHHPGR |
| | | | RGRPRPVGMEEEVGEGDRDSSCPLAVELLSIFEVVFRILFV |
| | | | FNCLRLRDLILIILRMVVLLGRGGWEIFKYWSRVLQFRIQE |
| | | | LKNSGFILFPSTPITVEEETNGITEPFRSPCNPIVIIPIRKKQGS |
| | | | ER |
| C.MW.9 | C | 236 | MRVRGILRNCQQWWIWGILGFWMLMICNVVGNLWVTV |
| 6.C120 | | | YYGVPVWKEAKTTLFCASDAKAYEKEVHNVWATHACVP |
| | | | TDPNPQEMVLENVTENFNMWKNDMVDQMHEDIISLWDQ |
| | | | SLKPCVKLTPLCVTLNCSNITSIVSRNVSNNDNMRNCSFNI |
| | | | TTEIRDKEKKEYALFYRLDIIPLEKNSSEYRLINCNTSAVTQ |
| | | | ACPKVSFDPIPIHYCAPAGYAILKCNNKTFNGTGPCNNVST |
| | | | VQCTHGIKPVVSTQLLLNGSLAEEEIVIRSKNLTDNAKIIIV |
| | | | QLKDPVTIVCTRPGNNTRKSVRIGPGQTFYATGEIIGNIRQ |
| | | | AHCNISKEDWNKTLQQVGKKLAEHFPNKTIEFKEHSGGDL |
| | | | EITTHSFNCRGEFFYCYTSTLFNSTYNAEYNSNSTNSSSTIT |
| | | | LQCRIKQIINMWQGVGRAIYAPPIEGNITCESNITGLLLTRD |
| | | | GGKDGNNTEIFRPGGGDMRDNWRSELYKYKVVEIKPLGI |
| | | | APTKAKRRVVEREKRAVGIGAVFLGFLGAAGSTMGAASIT |
| | | | LTVQARQLLSGIVQQQSNLLRAIEAQQHMLQLTVWGIKQL |
| | | | QARVLAIERYLKDQQLLGIVVGCSGKLICTTAVPWNSSWSN |
| | | | RSQDDIWQNMTWMEWDREINNYTNTIYRLLEDSQNQQE |
| | | | KNEQDLLALDSWKNLWSWFNITNWLWYIKIFIMIVGGLIG |
| | | | LRIIFAVLSIVNRVRQGYSPLSFQTLIPNPRGPDRLRRIEEEG |
| | | | GEQDKDSSIRLVSGFLALAWDDLRSLCLFSYHRLRDFILIV |
| | | | VRAVELLGHSSLRGLQRGWEALKYLWSLVQYWGLELKK |
| | | | SAISLLDTIAIAVAEGTDRIIELVQRIFRAICNIPRRIRQGFEA |
| | | | ALQ |
| C.CN.06. | C | 237 | MRVRGTLRNCQQWWMWGVLGFWMLMICNGGKNLWVT |
| CNE88 | | | VYYGVPVWKEAKTTLSCASDAKAYDTEVHNVWATHAC |
| | | | VPTDPNPQEMVLENVTENFNMWKNDMVDQMHEDVISLW |
| | | | DQSLKPCVKLTPLCVTLECRDVTNGTSGNDTLANDTSECK |
| | | | NGTNNETYDESVKELRNCSFNATTLVRDKKKTAYALFYR |
| | | | LDIMPLNEKKNSSENSSEYVLINCNSSAITQACPKVTFDPIPI |
| | | | HYCAPAGYAILKCNNKTFNGTGPCNNVSTVQCTHGIKPV |
| | | | VSTQLLLNGSLAEGEIIVRSENLTNNVKTIIVHLNQSVEIVC |
| | | | TRPNNNTRKSIRIGPGQTFYATGEIIGDIRQAHCIINASNWH |
| | | | KTLQEVSKELAGYFPNKTIIFNSSSGGDLEITTHSFNCRGEF |
| | | | FYCNTSGLFNSTYMTNGTYMFNGTYRLNNITSNSNITIPCR |
| | | | IKQIINTWQEVGRAMYANPIAGNITCKSNITGLLLVRDGGT |
| | | | NNATTETFRPGGGNMRDNWRSELYKYKVVEIKPLGIAPTE |
| | | | AKRRVVEREKRAVGIGAVFLGFLGAAGSTMGAASITLTV |
| | | | QARQLLSGIVQQQSNLLRAIEAQQHMLQLTVWGIKQLQT |
| | | | RVLAIERYLKDQQLLGIWGCSGKLICTTAVPWNSSWSNKS |
| | | | HEEIWNNMTWMQWDREISNYTNTIYRLLEDSQNQQERNE |
| | | | KDLLALDSWKNLWSWFDITNWLWYIKIFIMIVGGLIGLRII |
| | | | FAVLSIVNRVRQGYSPLPFQIRTPNPGGPDRLGRIEEEGGE |
| | | | QDKDRSIRLVSGFLALAWDDLRSLCLFSYHRLRDFILVAA |
| | | | RVVELLGRSSLRGLQKGWEALKYLGSLVQYWGLELKKSA |
| | | | TSLLDTIAIAVAEGTDRIIELGLSICRAIRHIPRRIRQGFEAAL |
| | | | Q |
| C.ZA.04. | C | 238 | MRVRGIPRNWPQWWIWGILGFWIIMMCRVMGNLWVTVY |
| 04ZASK | | | YGVPVWKEAKTTLFCASDAKAYEKEVHNVWATHACVPT |
| 182B1.A | | | DPNPQEMELKNVTENFNMWKNDMVDQMHEDIISLWDQS |
| Y878054 | | | LKPCVKLTPLCVTLNCTDVKKANNTTNIGNTTSNRNTTYN |
| | | | ATYNEYMKNCSFNITTEIRDKKRKEYALFYRPDIVPLENSS |
| | | | SEYILINCNSSTITQACPKVSFDPIPIHYCAPAGYAILKCNNK |
| | | | TFNGTGPRHNVSTVQCTHGIKPVVSTQLLLNGSLAEEEIIIR |
| | | | SENLTDNTKTIIVHLNKSVAINCTRPGNNTRRSIRIGPGQAI |
| | | | YTNNIIGDIRQAYCSISKEKWNKTLEQVKEKLKEYYKKTIE |
| | | | FQQPVGGDLEITTHSFNCRGEFFYCDTTKLFSPKNETDNNT |
| | | | ITLPCRIKQIINMWQEVGRAMYAPPIAGNITCNSNITGILLT |
| | | | RDGGDTHEKKRKHKRNKVTEIFRPAGGNMKDNWRSELY |
| | | | KYKVVEIKPLGVAPTGAKRRVVEREKRAVGMATMLFGFL |
| | | | GAAGSTMGAASITLTVQVRQLLSGIVQQQSNLLRAIEAQQ |
| | | | HLLQLTVWGIKQLQARVLAIERFLQGQQLLGLWGCSGKLI |
| | | | CTTNVPWNSSWSNKSEEDIWGNLTWMQWDREISNYTDII |
| | | | YRLLEDSQTQQEQNEKDLLALDSWKNLWSWFDISNWLW |
| | | | YIRIFIIIVGGLIGLRIIFGVLSIVNRVRQGYSPLSFQTLTPNPR |
| | | | ELDRLGRIEEEGGEQGRDRSIRLVSGFLTIAWDDLRSLCLF |
| | | | LYHQLRDFILIAARAAELLGRSSLRGLQRGWEALKYLGNI |
| | | | VQYWGLELKKSAISLLDTIAIAVAEGTDRIIRVIQSICRAIR |
| | | | NAPRRIRQGFEAALL |
| C.ZA.09. | C | 239 | MRVRGTLRNYQQWWTWGILGFWMLIIYSVAGNLWVTVY |
| GU08018 | | | YGVPVWTNAKTTLFCASDAKAYEKEVHNVWATHACVPT |
| 6.GU080 | | | DPHPQELVLANVTENFNMWKNDMVEQMHEDIINLWDES |
| 186 | | | LKPCVKLTPLCVTLRCTKVNGTANATSEGTANATSKDEE |
| | | | MTMYNCSFNTTTGIRDKTQQEYALFHKHDVVPSNIDNSEY |
| | | | ILIHCNTSTITQACPKVSFDPIPIHYCAPAGYAILKCNNKTF |
| | | | NGTGPCTNVSTVQCTHGIKPVVSTQLLLNGSLAEKEIIIRSE |
| | | | NLTDNSKTIIVHLNESVDIVCTRPGNNTRRGIRIGPGQTFFA |
| | | | TRTIGNIRQAHCNISESKWNTTLQRVSAKLKEYFNKTIIYN |
| | | | SSSGGDPEITTHSFNCRGEFFYCNTSRLFNRNSTDLSTNTG |
| | | | NNSTITLPCRIKQIINMWQGVGRAMYAPPIEGNITCKSIITG |
| | | | LLLVRDGGPNNSTETRPEPGREGNMKGNKFGRKSEIIIKYK |
| | | | VIENLSPLGEIHPTKAKRRAVEREKRAVVGIGAMILGFLGA |
| | | | AGSTMGAASITLTVHARQLLSGIVQQQSNLLRAIEAQQHM |
| | | | LQLTVWGIKQLQARVLAIERYLKDQRLLGLWGCSGKLICT |
| | | | TSVPWNSSWSNKSEADIWNNMTWMQWEKEINNYTYTIY |
| | | | QLLEDSQSQQEQNEKDLLELDKWQNLWSWFSITNWLWYI |
| | | | KIFIMIVGGLIGLRIIFAVLSIVNRVRQGYSPLSFQTLTPSPRE |
| | | | LDRRERIEEEGGEQDRDRSVRLVSGFLSLAWDDLRSLCLFI |
| | | | YHRLRDFILIATRVVELLGQRGWEALKYLGNLVLYWGLEI |
| | | | KKSAINLLDTIAIAVAEGTDRIIEVVHRACRAIRYIPRRIRQ |
| | | | DFEADLQ |
| C.IN.94. | C | 240 | MRVRGIRRNYQQWWIWGVLGFWILMICNGGGNLWVTVY |
| 94IN | | | YGVPVWKEAKTTLFCASDAKAYEKEVHNVWATHACVPT |
| | | | DPDPQEMVLENVTENFNMWKNDMVNQMHEDVISLWDQ |
| | | | SLKPCVKLTPLCVTLECRNVSTCNETYNESVKEIKNCSFNA |
| | | | TTEIRDRKQTVYALFYRLDIVPLDKKNSSRNSSDYYRLINC |
| | | | NTSAITQACPKVTFDPIPIHYCTPAGYAILKCNDKTFNGTG |
| | | | PCHNVSTVQCTHGIKPVVSTQLLLNGSLAEREIIIRSENLTD |
| | | | NVKTIIVHLNESVDIVCTRPNNNTRKSIRIGPGQTFYATGDI |
| | | | IGDIRQAHCNISEDKWNETLQRVSKNLAEHFPNKTIKFASS |
| | | | SGGDLEITTHSFNCRGEFFYCNTSGLFNGTYMSNGTESNSS |
| | | | SIITIPCRIKQIINMWQEVGRTMYAPPIKGNITCKSNITGLLL |
| | | | VRDGGTEPNDTETFRPGGGDMRNNWRSELYKYKVVEIKP |
| | | | LGIAPTAAKRRVVEREKRAVGLGAVFLGFLGAAGSTMGA |
| | | | ASITLTAQARQLLSGIVQQQSNLLRAIEAQQHLLQLTVWGI |
| | | | KQLQTRVLAIERYLRDQQLLGIWGCSGKLICTTAVPWNSS |
| | | | WSNRSEKEIWDNMTWMQWDREISNYTNTIYRLLEDSQNQ |
| | | | QERNEKDLLALDSWKNLWSWFDITNWLWYIKIFIMIVGG |
| | | | LVGLRIIFAVLSIVNRVRQGYSPLSFQTLTPNSGGPDRLGRI |
| | | | EEEGGEQDKDRSIRLVNGFLALAWDDLRNLCLFSYHRLK |
| | | | DCILVTARVVELLGRNSLRGLQKGWEALKYLGSLVQYWG |
| | | | LELKKSTTSLLDTLTIAVAEGTDRIIELGQSICRAIRNIPRRIR |
| | | | QGLEAALQ |
| C.IN.09. | C | 241 | MRVMEILRNYQQWWIWGILGFWMLMICNVGGNLWVTV |
| T125 | | | YYGVPVWKEAKTTLFCASDAKAHETEVHNVWATHACVP |
| | | | TDPKPQEIVLGNVTENFNMWKNDMVDQMHEDVISLWDQ |
| | | | SLKPCVKLTPLCVTLECGNVSVSNVSVSNTTQGDANVTHN |
| | | | EGANEIKNCSFKIATELRDKEQKVYALFYRLDIVQLNDSSN |
| | | | SSSSNNSSKYSKYRLINCDTSTVTQACPKVTFDPIPIHYCAP |
| | | | AGYAILKCNNETFNGTGPCTNVSTVQCTHGIKPVVSTQLL |
| | | | LNGSLAKGGVIIRSENLTENAKIIIVHLNESVEINCTRPNNN |
| | | | TRKSVRIGPGQTFYATGEIIGDIRKAYCEINEQKWNKTLRE |
| | | | VAKSLAKHFPNREIRFAPSSGGDLEIVTHSFNCRGEFFYCN |
| | | | TSGLFNRTYTTDLFNKTYNDNDTEDNSGPVIIIPCRIKQIIN |
| | | | MWQEVGRAMYAPPIAGNITCNSSITGLLLTRDGGNDNKTS |
| | | | TNETFRPLGGNMRDNWRNELYKYKVVEIKPLGIAPTTAK |
| | | | RRVVEREKRAVGMMGAMFLGFLGAAGSTMGAASITLTV |
| | | | QARQLLSGIVQQQSNLLRAIEAQQHLLQLTVWGIKQLQAR |
| | | | VLAIERYLKDQQLLGIWGCSGKLICTTAVPWNSSWSNKSY |
| | | | DEIWENMTWMQWDKEINNYTDTIYRLLEDSQIQQERNEK |
| | | | DLLALDNWKNLWNWFNISNWLWYIKIFIMIVGGLIGLRIIF |
| | | | AVLSIVNRVRQGYSPLSFQTLIPSPGGPDRLERIEEEGGEQD |
| | | | RDRSIRLVNGFLALAWDDLRNLCLFSYHRLRDFILVTARA |
| | | | VELLGHHSLRGLRKGWEALKYLGSLVQYWGLELKKGAIS |
| | | | LFDTIAIAVAEGTDRIIEFLQRLCRAIYNIPRRIRQGLEAALQ |
| C.ZA.99. | C | 242 | MRVKGIQRNWPQWWIWGILGFWMIIICRVVGNLWVTVY |
| Du123.D | | | YGVPVWTEAKTTLFCASDAKAYEREVHNVWATHACVPT |
| Q411850 | | | DPNPQEIVLGNVTENFNMWKNDMVDQMHEDIISIWDQSL |
| | | | KPCVKLTPLCVTLNCTDVKVNATSNGTTTYNNSIDSMNGE |
| | | | IKNCSFNITTEIRDKKQKVYALFYRPDVVPLNENSSSYILIN |
| | | | CNTSTTTQACPKVSFDPIPIHYCAPAGYAILKCNNKTFNGT |
| | | | GPCHNVSTVQCTHGIKPVVSTQLLLNGSLAEEEIIIRSENLT |
| | | | NNAKTIIVHLNESIEIVCTRPNNNTRKSIRIGPGQTVYATND |
| | | | IIGDIRQAHCNISKTKWNTTLEKVKEKLKEHFPSKAITFQP |
| | | | HSGGDLEVTTHSFNCRGEFFYCDTTKLFNESNLNTTNTTT |
| | | | LTLPCRIKQIVNMWQGVGRAMYAPPVEGNITCNSSITGLL |
| | | | LVRDGGNTSNSTPEIFRPGGGNMKDNWRSELYKYKVVEI |
| | | | KPLGVAPTKAKRRVVEREKRAVGIGAVLFGFLGAAGSTM |
| | | | GAASITLTVQARQLLSGIVQQQSNLLRAIEAQQHMLQLTV |
| | | | WGIKQLQARVLAIERYLKDQQLLGLWGCSGKLICPTTVP |
| | | | WNSSWSNKSQTDIWDNMTWMQWDREISNYTGTIYKLLE |
| | | | ESQNQQEKNEKDLLALDSWKNLWSWFDITNWLWYIKIFI |
| | | | MIVGGLIGLRIIFGVLSIVKRVRQGYSPLSFQTLTPNPRGLD |
| | | | RLGRIEEEGGEQDKDRSIRLVNGFLALAWDDLRSLCLFSY |
| | | | HRLRDFILVAARAVELLGRSSLRGLQRGWEALKYLGNLV |
| | | | QYGGLELKRRAISLFDTIAIAVAEGTDRILEVILRIIRAIRNIP |
| | | | TRIRQGFEAALL |
| C.NP.11. | C | 243 | MKVRGTQRNYPQWWIWGILGFWMLMICNVERNLWVTV |
| 11NP041 | | | YYGVPVWREAKTTLFCASDAKAYDQEVHNVWATHACVP |
| .KJ15843 | | | TDPNPQERSMENVTENFNMWENDMVDQMHEDVISLWDQ |
| 0 | | | SLKPCVKLTPLCVTLNCTDAKVNITADNSKTYNESMKEIK |
| | | | NCSFNATTVIKDKKQTVYALFYKLDIVPLDNEEQENNGNE |
| | | | NYTYRLINCNTSTITQACPKVTFDPIPIHYCAPAGFAILKCN |
| | | | DKTFNGTGPCSNVSTVQCTHGIKPVVSTQLLLNGSLAEEEI |
| | | | IIRSKNLSQNHRTIIVHLNESVGIECTRPSNNTRKSIRIGPGQ |
| | | | TFFATGEIIGNIRQAHCNISKEKWDKTLQMVGKKLAEHFP |
| | | | NKTIIFAPASGGDLEITMHSFNCRGEFFYCDTKKLFNATYM |
| | | | NDDTANNSRSNGNDTVTLPCKIKQIINMWQEVGRAMYAP |
| | | | PIAGNITCKSNITGLLLVRDGGKMNQNIETNKTETFRPEGG |
| | | | NMKDNWRSELYKYKVVEIKPLGIAPTKAKRRVVEREKRA |
| | | | VGLGAVFLGFLGVAGSTMGAASITLTAQARQLLSGIVQQQ |
| | | | SNLLKAIEAQQHLLQLTVWGIKQLQTRILAIERFLQDQQLL |
| | | | GIWGCSGKLICTTAVPWNNTWSNKSESEIWNNMTWMQW |
| | | | DREISNYTFTIYQLLEDSQIQQEKNEKDLLALDSWNSLWS |
| | | | WFNITSWLWYIKIFIMIVGGLIGLRIIFAVLSIVNRVRQGYS |
| | | | PLSLQTLIPTPREPDRPRGIEEGGGEQDNATSIRLVNGFLAL |
| | | | AWDDLRNLCLFSYRHLRDLLSVIARVVGLLGRVGGGGLQ |
| | | | RGGKAPKLGGLGAYWGLEIKKSVFSCLIRLAIAVLKGTVR |
| | | | FLKLVQDFGKGINNYPRRIPGFETGL |
| C.SE.09. | C | 244 | MRVMGTLRSCQRWWIGGILGFWMLFMCSVGEDLWVTV |
| 035ZA. | | | YYGVPVWKEAKTTLFCASDARAYEKEVHNVWATHACVP |
| MF37314 | | | TDPNPQEMILKNVTENFNIWKNDMVDQMHEDIISLWDQG |
| 8 | | | LKPCVKLTPLCVTLNCSNVNSSSVANSTNSTNSGNITNANT |
| | | | TNVNITDSDMKNCSFNITTELRDKTRKEYALFYRPDIVPLS |
| | | | NSNSSEYILINCNSSTITQACPKVSFEPIPLHYCAPAGYALL |
| | | | KCRDTKFNGTGPCKNVSTVQCTHGIKPVVSTQLLLNGSLA |
| | | | EDEIVIRSENITNNAKTIIVQLKEPVTIMCTRPNNNTRKSMR |
| | | | IGPGQTFYATGAIIGNIRQAHCNISRTNWTKTLQEVGEKLQ |
| | | | EQELFKNKTIKFTEHSGGDIEITTHSFNCGGEFFYCNTSELF |
| | | | NGTYSNGTYTPNNNGSDSNLTITIPCRIKQVVNLWQGVGQ |
| | | | AMDAPPIAGISWGSIRGLLLPGGGPNPSTAEIFRPGGGDMR |
| | | | DNWRSELYKYKVVEVNPLGIAPTRAKRRVVEREKRAVGI |
| | | | GAVFLGFLGAAGSTMGAASVTLTVQARQLLSGIVQQQSN |
| | | | LLRAIEAQQHMLQLTVWGIKQLQARVLALERYLRDQQLL |
| | | | GIWGCSGKLICTTAVPWNSSWSNKSYDAIWDNMTWMQW |
| | | | EKEIDNYTDTIYRLLEVSQTQQEQNERDLLALDKWNNLW |
| | | | SWFNISNWLWYIKIFIMIVGGLIGLRIIFAVLSIVNRVRQGY |
| | | | SPLSLQTLIPSPRGPDRPGGIEEEGGEQDRSSSIRLVSGFLAL |
| | | | AWDDLRSLCLFSYHRLRDLVLIAARGVNLLGQRGWEALK |
| | | | LLWSLVQYWGLELKKSAISLFDTLAITVAEGTDRIIEIVQR |
| | | | TWRAICNIPRRIRQGFEAALQ |
| C.SE.03. | C | 245 | MSVKDILENYQHWWIWGLLAFWMQMVCMGDNLWVMV |
| 004ZM. | | | YYGAPVWREAKPTLFCASDAKGYNKESQSVWATCACVP |
| MF37312 | | | TDPPPQELVLGIVTEYFNVWKMDGIHCEGYNLLGYQPKPV |
| 6 | | | CKGNICVLKLYICYCYQQFWLVGEMKNCTLNATTELRDN |
| | | | RKKESALFYRLDVLPLNSSDNNNNEYRLINCSTSAITQACP |
| | | | KVSFDPIPIHYCAPAGYAILKCNDRTFNGTGPCKNVSTVQC |
| | | | THGIKPVVSTQLLLNGSLTKEIIISSENLTKNTKTIIVHLNES |
| | | | VGIVCIRPNNNTRKSVRIGPGQTFFATGAIIGEIRQAYCTVN |
| | | | GSAWNNTLQRVRKKLRRYFSKAIRFEPSSGGDLLLTTHSF |
| | | | TCRGGYFYCNTSNLINNNINIASASTIQRRIKQIINMWQGV |
| | | | GRAMYAPPIAGNITCKSNITGLLLTRDGGENNRTETFRPGG |
| | | | GDMKDNWRSELYKYKVVESKPLGIAPTKAKRRVVEREKR |
| | | | AVGLGAVFLGFLGAAGSTMGAASITLTVQARQLLSGIVQQ |
| | | | QSNLLKAIEAQQHMLQLTVWGIKQLQARVLAIERYLEDQ |
| | | | QLLGMWGCSGRRICTTALSWNSSWSNKTYDDIWNNMTW |
| | | | MQWDREISNYTDTIFRLLEDSQNQQEKNEKDLLALDSWK |
| | | | NLWSWFNITKWLWYIKIFIMIVGGLIGLRIIFAVLSIVNRVR |
| | | | QGYSPVSLQTLIPAPRGPDRPGGIEEGGGEQDKDRSIRLLN |
| | | | GFLTLVWDDLRSLCLFSNHRLRDFILQSQRAVEVVGRRG |
| | | | WEAKKYAGGGLQYWGEELKQSGFSSNDTIAIVVEEGTDRI |
| | | | IQVLQWIGRASNNIPGRIRQGFEVAGQ |
| C.SE.12. | C | 246 | MRVMGMQRNCQKWWVWGILGFWMFMIYNVMGNLWV |
| 076SO.M | | | TVYYGVPVWKEANPTLFCASDAKGYEREVHNVWATHAC |
| F373179 | | | VPTDPNPQELFLENITENFNMWKNEMVEQMHQDIISLWD |
| | | | QSLKPCVKLTPLCVTLRCSNVTYNETIREMTNCSFNVTTEL |
| | | | RDRRQEVYALFYKLDVVSLNKSGDYRLINCNTSTITQACP |
| | | | KVSFDPIPIHYCAPAGYAILKCNDEEFNGTGPCGNVSTVQC |
| | | | SHGIKPVVSTQLLLNGSLAENVTIRSENLTNNAKTIIVQLRE |
| | | | PVYINCTRPNNNTRKSIRIGPGQALYATGEVIGDIRHAHCNI |
| | | | SKEKWKTALTGVRERLRELFNRTILFNKSSGGDLEVTTHS |
| | | | SNCRGEFVYCDTSDLLTTSVSVQKVLVITSTDAIILRCQIQH |
| | | | IISMWQVRRALYAPPMKGMRSSTCTITGTTDLRDGRTDYH |
| | | | SMYIVRPGGGDMRDNWRSELYKYKVVEVKPIGIAPTGAK |
| | | | RRVVEREKRAALGAVFLGFLGAAGSTMGAASVTLTVQAR |
| | | | QLLSGIVQQQNNLLRAIEAQQHMLQLTVWGIKQLQTRVL |
| | | | ALERYLRDQQLLGIWGCSGKLICTTNVPWNGSWSNRSQQ |
| | | | EIWENMTWMQWEREIDNYTNIIYELLEVSQNQQETNERD |
| | | | LLALDKWNNLWSWFNISNWLWYIRLFIMIVGGLIGLRIIFA |
| | | | VLSIVNRVRQGYSPLSFQTLIPNPRGPDRPGGIEEEGGEQD |
| | | | RDRSIRLVSGFLALAWDDLRSLCLFSLLHLRDLIEIVARAV |
| | | | ELVEHSSLRGLQRGWDTLNYLRSLVQYRSKEIKKSATNM |
| | | | LDTTAIAVDEVTDSIIGFAQRIWRGICNIRARIRQGYEAGG |
| | | | Q |
| C.NP.11. | C | 247 | MRVRGILRNYQQWWIWGILGFWMFMICNGVGNLWVTV |
| 11NP007 | | | YYGVPVWREAKTTLFCASEAKSYEKEVHNVWATHACVP |
| .KJ15842 | | | TDPNPQEQVLDNVTENFNMWENDMVEQMHEDVISLWDQ |
| 3 | | | SLKPCVKLTPLCVTLNCTDINITGGGAECMASNERIREVRN |
| | | | CSFNATTEIRDKKQKVYALFYKLDIVSLYNLDIVAIQASSG |
| | | | HYRLINCNTSAITQACPKVSFDPIPIHYCVPAGYAILKGNN |
| | | | KTFKGPGHGNKVSTVQTHGIKPVVSTQLLLNGSLAEEEIII |
| | | | RSKNLSDSTKIIIVQFNQSVKIVCARPNNNTRKSIRIGPGQV |
| | | | FYATGDILGDIRQAHCNISKNKWKDTLHNVSKILAEQFSIK |
| | | | TIIFTSSSSSTLNFNRHSFNCRGAFLYCNSCYLFNRLYTAAN |
| | | | TKSNSWIDINCTVAIPCRIKQIINMWQEVGRAMYANPIEGN |
| | | | ITCKSDITGMLLERDCGKERDKTISTTKEIFRPIGGNMRDN |
| | | | WRSELYKYKVVEIKPLGVAPTEAKRRVVEREKRVAGLGA |
| | | | VFLGFLGAAGSTMGAASITLTVQARQLLSGIVQQQSNLLR |
| | | | AIEAQQHLLQLTVWGIKQLQTRVLAIERYLKDQQLLGLW |
| | | | GCSGKLICTTAVPWNSNWSSKSQTEIWNHTTWMQWDREI |
| | | | NNYTNTIYQLLEDSQNQQEKNEKDLLALDRWKNLWNWF |
| | | | DISNWLWYIKIFIMIVGGLIGLRIIFAVLSIVNRVRQGYSPLS |
| | | | FQTLTPNPRELDRLGRIEEEGGEQDRDRSIRLVNGFFSLAW |
| | | | DDLRSLCLFCYHRLTDLISVTARAVELLGRSSLRGLQRGW |
| | | | KVLKYLGSLVQYWGLELKKSAIRLLDITAIAVAEGTDRIIE |
| | | | FFQRLCRAICNIPRRIRQGFEAALQ |
| C.ZA.09. | C | 248 | HQWWIWGILGFWMIYNVVGNLWVTVYYGVPVWKEAKT |
| 704MC0 | | | TLFCASDAKAYEKEAHNVWATHACVPTDPNPLEIVMGNV |
| 03N.GU0 | | | TENFNMWDNSMVEQMHEDIISLWDESLKPCVKLTPLCVT |
| 80161 | | | LECDNVTYTGNEDSITEKEMKNCSFNATTEIEDKKRKERV |
| | | | LFHSLDIVPLENNNSSNNGSSNKKYRLINCDTSTTTQACPK |
| | | | VSFDPIPIHYCAPAGYAILKCNNETFNGTGPCHNVSTVQCT |
| | | | HGIKPVVSTQLLLNGSLAEKEIIIRSENLTENAKIIIVHLNESI |
| | | | EIMCIRPGNNTRKSVRIGPGQTFYANDIIGDIRKAHCKVNR |
| | | | SKWNETLQKVGIKLKEHFNKTIIFESSSGGDPEITTHSFNCG |
| | | | GEFFYCNTSGLFNGTFNGTYTNSTQNETTITLPCRIKQIINM |
| | | | WQGVGRAMYAPPIAGNITCTSNITGLLLLRDGGNTTNSKE |
| | | | EEIFRPGGGNMRDNWRSELYKYKVVEVKPLGVAPTGAKR |
| | | | RVVEREKRAVIGAVVLGFLGAAGSTMGAASIALTAQARK |
| | | | VLSGIVQQQSNLLRAIEAQQHLLQLTVWGIKQLQARVLAV |
| | | | ERYLQDQQLLGIWGCSGKLICTTNVPWNSSWSNKSLDDI |
| | | | WGNMTWMQWDKEVSNYTHTIYSLLEESQIQQERNEKELL |
| | | | ALDKWQSLWNWFDITNWLWYIKIFIMIVGGLIGLRIIFAVL |
| | | | SIVNRVRQGYSPLSFQTLTPTSRGPERLGGIEEEGGEQGKD |
| | | | RSIRLVSGFLTIVWDDLRSLCLFSYHLLRDFVLIVARGVEL |
| | | | LGRRGWETLKYLGSLVQYWGLELKKSAISLLDTIEIIVAEG |
| | | | TDRIINFLQSICRAIRNIPRRIRQGFEAALL |
| C.ZA.05. | C | 249 | MRVRGIQRNWPQWWIWGILGFWIILSCRGVGDLWVTVY |
| 05ZAFV | | | YGVPVWREAKTTLFCASDAKAHVREVHNIWATHACVPT |
| 26.DQ38 | | | DPNPQEMVLENVTENFNMWKNDMVDQMHEDIINLWDQ |
| 2378 | | | GLKPCVKITPLCVTLRCTNATFTANDSNDNNVTMSEWTE |
| | | | MTTCSFSNTTQIGDALQTAYALLYLTDSKPLFERCYTSIHL |
| | | | PYLTHGTLGDPKASCYRAPIHYCAPAGYAIRKCNDRTFNG |
| | | | TGPCNRVSTVQCTHGIKPVVSTQLLLNGSLAEEEIMIRSEN |
| | | | LTDNTKTIIVQLKEPVEINCTRPGKGKRTRVRIGPGRTFYA |
| | | | TGAVTGDIRKAHCTVNGSRWNSTLEQVREKLKKYYDNRT |
| | | | IKFEQPSGGDPEVTTHSFNCRGEFFYCDTTNLFNISNINSTS |
| | | | NITLQCKIKQIINMWQKVGRAMYAPPIEGTITCISNITGLLL |
| | | | TRDGGSSNETSSINKTEIFRPGGGNMKDNWRSELYKYKVV |
| | | | EIKPLGIAPTGAKRRVVEREKRAVGIGAVFLGFLGAAGST |
| | | | MGAASITLTVQARQLLSGIVQQQSNLLRAIEAQQHMLQLT |
| | | | VWGIKQLQARVLALERYLTDQQLLGLWGCSGKLICTTNV |
| | | | PWNSSWSNKSRADIWDNMTWMQWDREINNYTDTIYRLL |
| | | | EESQTQQEKNEKDLLALDSWKNLWNWFNISNWLWYIKIF |
| | | | IMVVGGLIGLRIILGVLSIVKRVRQGYSPLSFQTLIPNPRDP |
| | | | DRLGGIEEEGGEQDRDRSIRLVSGFLSLAWDDLRSLCLFSY |
| | | | HQLRSFILVTARAVQLLGRSSLRGLQGGWEALKYLGNLV |
| | | | QYWGLELKRSAISLLDTIAITVAEGTDRIIELIQGICRAICNI |
| | | | PRRIRQGFERALL |
| C.ET.08. | C | 250 | MRVMGTSRNCQQGWIWGILGFWMFMICNVLGNLWVTV |
| ET119.K | | | YYGVPVWKEAKTTLFCASDAKAYDTEVHNVWATHACVP |
| U319532 | | | TDPNPQELVLENVTENFNMWKNDMVDQMHQDVISLWDE |
| | | | SLKPCVKLTPLCVTLNCSDATINGTIVEKMKNCSFNVTSTL |
| | | | KPTKLKAYALIYRTELVPLIENQINGNYMITGYLNNLNITK |
| | | | SGQTVSFGPFRPHPWPHAGQASLTVKCNNISFKGTGPCNK |
| | | | VSSVQCTQGIKLVEWTRLMLYGSIAEEQIEIRCENLTIKTG |
| | | | LIIVQLKESVAIRCERPKNNTRGSMRVGPGQTFYATGDIIG |
| | | | DIRQDHSNISEKEWNETKQKVVEKLIELLPTTRKLTRSSGG |
| | | | DPEITTHSFNCRGEFFYCDTTNLFNSTYNGTSTNSTSSGTIT |
| | | | LSCSIKQIIQMWQGLRKVLNAPVCAPLDGNIKCTSNFTGLL |
| | | | LPRAGGSGLNDTDAEVFRPAGGDMRDNWRSELYKYKVV |
| | | | EIKPLGVAPTTAKRRVVEREKRAVGIGAVFLGFLGAAGST |
| | | | MGAASITLTVQARQLLSGIVQQQSNLLRAIEAQQHLLQLT |
| | | | VWGIKQLQTRVLAVERYLQDQQLLGIWGCSGKLICTTAV |
| | | | PWNSSWSNRTQDEIWNNMTWMQWEKEINNYTGTIYRLL |
| | | | EDSQNQQEKNEKDLLALDKWQNLWSWFSISKWLWYIKIF |
| | | | IMIVGGLIGLRIIFAVLSIVNRVRQGYSPLSFQTLIPVPRTDR |
| | | | LSMCLFSYRHLRDVLLIAARILNLLGQRRWETIKYLGSIVQ |
| | | | YWSIELKKSAINLLDAIAIVVAEGTARILEAIQRIWRAIFNIP |
| | | | RRIRQGLEAALQ |
| C.ES.x. | C | 251 | MRVTGTRKNCQQWWIWGILGFWMLMIYNVKGLWVTVY |
| MH08.E | | | YGVPVWREANTTLFCASDAKAYDKEVHNVWATHACVPT |
| F531335 | | | DPKPQEQWLKNVTEDFNMWKNNMVEQMHEDIISLWDQS |
| | | | LKPCVKLTPLCVTLNCTNATSIVNMTDVASNRSRSNDTVE |
| | | | NVNGTSVENMTIVNSTDEIKNCSFNITTGIGDKPKKESALF |
| | | | YSLDIVPLNKSANNSEYILITCKTSKITQACPKVSFEPIPIHY |
| | | | CAPAGYAILRCDNKTFNGTGPCNNVSSVQCTHGIRPVVTT |
| | | | QLLLNGSLAEEDIIIRSVNMSNNAKTIIVHLNESVEIICTRPN |
| | | | NNTRKSVGMGPGQAIYTTGAIIGNIRQAHCNISGRNRSRTL |
| | | | QRVSEKLQKYFYNKTIKFQPHSGGDPEITTHSFNCGGEFFY |
| | | | CNTSDLFNSTYFNNTYFNGVYNGTRDNGTITLPCRIKQFIN |
| | | | MWQRVGRAMYAPPIQGLITCRSNITGLLLTRDGGNTINNT |
| | | | NNNTEIFRPGGGDMRDNWRSELYKYKVVEIRPLGVAPTD |
| | | | ARRRVVGREKRAVMGALFLGFLGAAGSTMGAASMALTV |
| | | | QTRQLLSGIVQQQSNLLRAIEAQQHMLQLTVWGIKQLQA |
| | | | GVLALERYLQDQQILGIWGCSGKRICTTDVPWNSSWSNKT |
| | | | KEYIWGNMTWMQWDKEISNYTGIIYDLLEESQNQQEKNE |
| | | | QELLALDSWKNLWNWFNITNWLWYIKIFIMIIGGLIGLRIIF |
| | | | AVLSIVHRVRQGYSPLSFQTLIPNQREPDRPGRIEEEGGGQ |
| | | | DRDRSIRLVSGFLALAWGDLRSLCLFSYHRLRDCISIAARA |
| | | | GELLGRSSLKGLQRGWETLKYLGSLVQYWGLELKKSAISL |
| | | | LDTIAIAVAEGTDRIIEFIQRICRAICNIPRRIRQGLERILL |
| C.ZA.09. | C | 252 | MRVTGIPRNWPQWWIWGILGFWIMVMCNKTENLWVTVY |
| 704MC0 | | | YGVPVWTDAKTTLFCASDAKAYVKEVHNVWATHACVPT |
| 19F.GU0 | | | DPNPQELELKNVTEDFNMWKNDMVDQMHEDVISLWDQS |
| 80178 | | | LKPCVKLTPLCVTLNCTEVTPNCTKVNNSSSNNTTVAPTT |
| | | | ATCNNHTKDNASIIGEREMRNCSFNITTEIRDKKQKAYALF |
| | | | YRPDIVPLNGNPNTTEYILINCNTSTITQACPKVTFDPIPIHY |
| | | | CAPAGFAILKCNNKTFNGTGPCNNVSTVQCTHGIKPVVST |
| | | | QLLLNGSLAEEDIIIRSENLTSNTKTIIVHLNESVKIECLRPG |
| | | | NNTRKSIRIGPGQTFYATGAIIGDIRQAHCNISTLAWNATLE |
| | | | RVRGKLKEHFPNKTINFTSPAGGDLEVITHSFNCQGEFFYC |
| | | | NTTNLFDKFNSSGPNITTIPCRIKQIINMWQEVGRAMYAPPI |
| | | | AGNITCNSNITGLLLTHDGINITYNGTGNTTHFRPGGGNMK |
| | | | DNWRSELYKYKVVEIKPLGVAPTKAKRRVVEREKRAVGL |
| | | | GAMILGFLGTAGSTMGAASITLTVQARQLLSGIVQQQSNL |
| | | | LRAIEAQQHMLQLTVWGIKQLQARVLAIERYLKDQQLLG |
| | | | LWGCPGKLICTTNVPWNISWSNKSYNKIWDEMTWMQWD |
| | | | KEISNYTDTIYRLIEDSQSQQEKNEKDLLALDSWNNLWNW |
| | | | FNITNWLWYIRIFIMIVGGLIGLRIIFCVLSVVRRVRQGYSP |
| | | | LSFQTLIPNPRGPDRPERIEEGGGEQDRRKSIRLVSGFLALA |
| | | | WDDLRSLCLFSYHHLRDFILIVLRAVELLGRSSLRGLQRV |
| | | | WEALKYLGNLVLYWGQELKKSAISLLDTIAIAVAEGTDRI |
| | | | LEVLQGIWRGIRNIPRRIRQGFEASLL |
| C.ZM.02. | C | 253 | MRVMGILRSYQQWWIWGILGFWMVMTCNVGGNLWVTV |
| ZM211M | | | YYGVPVWKEAKTTLFCASDAKSYEKEVHNIWATHACVPT |
| | | | DPDPQELVLENVTENFNMWKNDMVDQMHKDIISLWDQS |
| | | | LKPCVKLTPLCVTLNCTDVKGNVTYSDKGNLAHSNSTDE |
| | | | MKNCTFNVTTELRDKSKKESALFYRLDIETLDPKGNSSNN |
| | | | NSSYKEYILINCNTSTIAQSCPKITFDPIPIHYCAPAGYAILK |
| | | | CNNKAFNGTGPCNNVSTVQCTHGIKPVVSTQLLLNGSLAE |
| | | | GGIIIRSANLTDNAKTIIVHLNESVGITCVRPGNNTRKSVRI |
| | | | GPGQTFYATGQIIGDIRQAHCNITGSEWNRTIDRVGKKLQE |
| | | | HFPNKTINFTQPSGGDLEITMHSFNCGGEFFYCNTSGLFNT |
| | | | SGLFNDTEGWINPINKTSNITIQCRIKQFINMWQEVGRAMY |
| | | | APPIAGNITCTSNITGLLLTRDGGNSSSNTEIFRPGGGDMRD |
| | | | NWRSELYKYKVVEIKPLGIAPTTAKRRVVEREKRAALGA |
| | | | MFLGFLGAAGSTMGAASVTLTVQARQLLSGIVQQQSNLL |
| | | | RAIEAQQHLLQLTVWGIKQLQTRVLAIERYLKDQQLLGIW |
| | | | GCSGKLICTTAVPWNSSWSNKTQNEIWNNMTWMQWDKE |
| | | | VSNYTDQIYRLLEKSQNQQEKNERDLLSLDSWNSLWSWF |
| | | | SITKWLWYIKIFIMIVGGLIGLRIIFAVLSVVNRVRQGYSPL |
| | | | SFQTLIPSPRGPDRPGRIEEEGGEQDRNRSTRLVSGFLALV |
| | | | WDDLRSLSLFSYHRLRDFILIATRAAELLGRSSLRGLQRG |
| | | | WEALKYLGNLVQYWGQELKRSAISLFDTIAIIVAEGTDRII |
| | | | ELAQRICRARQGETALL |
| C.SE.06. | C | 254 | MRVMGIQRNCQQWWIWGILGFWMLLICNGMGNLWVTV |
| 018SE.M | | | YYGVPVWKEASPTLFCASDAKAYESEVHNVWATHACVP |
| F373138 | | | TDPSPQELVLKNVTENFNMWKNDMVEQMHQDIISLWDQS |
| | | | LKPCVKLTPLCVTLNCSNVDNSTTINGTIHPNEEGKNCSFY |
| | | | ITTKLKLKIRQKFALFYDPDNLILIDNDNSMYLLNCNTSTIT |
| | | | QTCPWVSFDFDPIPYCDRAAYGILIRNNNKFNVTGPCPSVN |
| | | | AGQCTRGIGTMPSTPLLLNGNITKEDIVIISEYLDNNANVIII |
| | | | QLNKTVPVNCTRPRHNTRTRVRMRPGQRLYVSADIIGNIR |
| | | | LAHCHCIGSGRYDTLELVKLNTLEHCLYHKTIMFTHPSGG |
| | | | ALPTTTHTLNCGGELFYCSTSSLLNFTWRSLFCHAQAPFQE |
| | | | THNNSTNNIPFPCRIKQFINMWQTVGRAMYAPPIAGVITCN |
| | | | SNITGLLLTRDGGNPTNSTEGNNETEIFRPGGGDMRDNWR |
| | | | SELYKYKVVEIKPLGVVPTKAKRRVVEREKRAALGAMFL |
| | | | GFLGAAGSTMGAASIALTVQARQLLSGIVQQQNNLLRAIE |
| | | | AQQHMLQLTVWGIKQLQTRVLALERYLRDQQLLGIWGCS |
| | | | GKLICTTAVPWNSSWSNKSQEEIWDNMTWMQWEREIDN |
| | | | YTDIIYNLLEVSQIQQETNEKDLLALDKWHNLWSWFDISN |
| | | | WLWYIKIFIMIVGGLIGLRIIFAVLSIVNRVRQGYSPLSFQTL |
| | | | IPSPRGPDRPGGIEEEGGENDRGRSIRLVSGFLGLAWDDLR |
| | | | SLCLFCYHRLRDLLLIAARVVELLGQRGWEILKYLGSLVQ |
| | | | YWGLELKKSAISLLDTVAIVVAEGTDRIIELIQRAWRTICNI |
| | | | PVRIRQGFEAALL |
| C.SE.07. | C | 255 | MTVMGIQMNCPQWWRWGILSLWMFMIWNVWGKGNLR |
| SE60011 | | | VTVYYGVPVWVEAKTTLFASDANAHSEEVHNVRATHAC |
| 9.KP411 | | | VCAHPNPQEINVTENFNMCKNDMEKQMHEDIVSLCHQSL |
| 831 | | | KPCVRVTPLCVTCHLTSSVITDTDTISSSLIINDDDSNMNCC |
| | | | SFITTAVNRDKKKDDAALYYRLVVVPDDEEKKNNCSECR |
| | | | LINCNSSAVPQACTKVSDEPILIHYCAPAGYAIIKCNDTTFN |
| | | | ATAPCNNVTALQCPRGITPVVSHQLLLNGSAAERGDSIRSE |
| | | | NITNNATTIIVHLKNPVEISRNYCTRPHINTRKSMRIGPGQIF |
| | | | YATGDIIGNIRQAHCNISAKEWNETLLMVSEKLLKHFPNK |
| | | | TTINFPSSSGEDQTITKRSFCRGEQFFYCNTSILSNTTYSYNS |
| | | | TSNTTCSTNNTTTSTFTLQCRRIHIIIMCLEPGLAIDASPTAG |
| | | | EIISKSNTTDLLLTRAGGSNRTEIFRPGGGDMRDNWRSELY |
| | | | KYKVVEIKPLGIAPTKAKRRVVEREKRAVGIGAVFLGFLG |
| | | | VAGSTMGAASITLTVQARQLLSGIVQQQSNLLRAIEAQQH |
| | | | MLQLTVWGIKQLQTRVLAIERYLKDQQLLGIWGCSGKLIC |
| | | | TTNVPWNKSWSNKTQKDIWDNMTWMEWDREISNYTDII |
| | | | YSLLVDSQTQQEKNEKELLALDSWKNLWNWFNITNWLW |
| | | | YIKIFIMIVGGLIGLRIIFAVLPIINRVRQGYSPLSFQTIIPNPR |
| | | | GPDRLGRIEEEGGEQDRNRSIRLVNGFLALAWDDLRSLCL |
| | | | FSYHRLRDFILIVVRAVELLGHSSLRGIQRGWEALKYLGSL |
| | | | VQYWGLEIKKSAISLFDTLAIVVAEGTDRIIELVQRIFRAIC |
| | | | NIPRRIRQGSEASLL |
| C.CY.07. | C | 256 | MRVRGILRNWQQWGIWGILGFWMLMICNVVGNKDLWV |
| CY205.J | | | TVYYGVPVWKEAKTTLFCASNAKAYEREVHNVWATHAC |
| F683757 | | | VPTDPNPQKIDLENVTENFNMWKNDMVDQMHADVISLW |
| | | | KESLKPCVKLTPLCVTLNCTEVTVIKNTGVNMTNNSTSTSI |
| | | | DTSILNDTSNADLKNCSFNTTTKISDNEIFEFAVNNTLDVEP |
| | | | IDGTYTSITFRLTNSNSSSIPQACPKVSFDPLPIPYCAPAGYT |
| | | | GLRCSNNTFTGTGPCRNVSTVQCTHGIKPVVSTQLLLNGS |
| | | | LAEGEIMIRSENLTNNAKTIIVHLNESVNIVCTRPNNNTRK |
| | | | GVGIGPGQAIYATGAIIGDIRQAHCNITKRGWNGLPQKVK |
| | | | GKLREHLPGKLIIFQPHSGGDLQITMHTFNWGGEFFYCNTS |
| | | | VLSNSTHNSGTGWHLQSSDINSYATIAVSYRIGQIINMWRQ |
| | | | VGRAIYGPPVARKMSAHPSTTGLLLVCDGGEKSLNSTNGT |
| | | | GITNATEIFRPQGGDMKDNWRSELYKYKVVEIKPLGIAPT |
| | | | EARRRVVEREKRAVGIGAVILGFLGAAGSTMGAASIALTA |
| | | | QARTVMAGIVQQQSNLLRAIDAQQHMLQLTVWGIKQLQ |
| | | | ARVLALERYLKDQQLLGIWGCSGKLICTTTVPWNTSWSN |
| | | | RSKEEIWNNMTWMQWEREIDNYTEIIYQLLGESQIQQEQN |
| | | | EKDLLALDSWKNLWSWFSISNWLWYIRIFIMIVGGLIGLRI |
| | | | IFAVLSIIHRVRQGYSPLSLQTLIPNSREPLDRLGRIEEGGGE |
| | | | QDRSRSIRLVNGFLALAWDDLRSLCLFCYHLLRDFILIVAR |
| | | | VGELLGHSSLRGLQKGWEALKYLGSLVQYWGLELKKSAI |
| | | | SLLDTVAIAVAGRTDRIIEVIQEICRAIYHIPRRIRQGFEAAL |
| | | | L |
| C.SE.06. | C | 257 | MKGRRNTENLSPGWIWGILGFWMLMMHKGEGNLWFTV |
| SE60051 | | | YYGLPVWTEPKPTLFGASNAKGYKTEVHMVWATHACVP |
| 6.KP411 | | | TNPNQQDLVLENVTENFSMWKNDMLDQMHEHVVIFSDQ |
| 839 | | | GLKPYAKVTSLTVTVTCTDLKNSTFTSTSSNDTSMVTESEE |
| | | | MKNCSFNITTEIRDKKKKEYALFYRLDIVPLKEKEDNNSD |
| | | | YRLINCNTSAVTQACPKVSFDPIPIHYCAPAGYAILKCNNK |
| | | | TFNGTGPCNNVSTVQCTHGIKPVVSTQLLLNGSLAEKEIVI |
| | | | RSENLTNNAKIIIVHLNESVEIVCTRPNNNTRKSMRIGPGQT |
| | | | FYATGDIIGNIRQAYCNISEKRWNETLQKVSKKLREHFPNK |
| | | | TIKFKPSSGGDLEITTHSFNCGGEFFYCNTSKLFNSTYPPNS |
| | | | TDTYMNSANTSNIILQCRIKQIINMWQGVGQAMYAPPIAG |
| | | | NITCESNITGLLLTRDGGNNQTEEETFTPGGGDMRDNWRS |
| | | | ELYKYKVVEIKPLGIAPTKAKRRVVEREKRAVGIGAVFLG |
| | | | VLGAAGSTMGAASITLTVQARQLLSGIVQQQSNLLRAIEA |
| | | | QQHMLQLTVWGIKQLQTRVLAVEGYLKDQQLLRIWAAS |
| | | | GKLICTTNVPWTPSWSIKSQEEIWNNMTWMQCDREITYTE |
| | | | NLIQCLAPQPRKWKDTTCNGDLDLDKWQNLWKWFNIPK |
| | | | WLWYIELFIMIVGGLIGLRIIFAVLSIVNRVRQGYSPLSFQT |
| | | | LLPSPRGPDRLGGTEEESGEQDRDRSVRLVNGFLPLVWND |
| | | | LRSLCLFCYHQLRTFILVTARAVELLGRSILRGLQTGWEAL |
| | | | KYLGGIVQYWGLELKKSAISLFDTLAIVVAEGTDRIIEVVR |
| | | | GFFRAIYNIPRRIRQGLEAALQ |
| C.ET.08. | C | 258 | MRVMGIHEELSTMGWIWGILGFWMLLICNVMGNLWVTV |
| ET124.K | | | YYGVPVWTEANPTLFCASDAKSYEPEVHNVWATHACVPT |
| U319534 | | | DPNPQELVLENVTENFNMWKNGMVEQMHQDIISLWDQS |
| | | | LKPCVKLTPLWVTLNCSDVNVTAIIDADILTMYEPVINRSF |
| | | | STTPKLKKKTETDLFHYVEVEALDMTATDDGYINCNTSTL |
| | | | TITCPCVSFAPVPIPYCAPAGYAIPIRNGNNFTGPGPCPSVN |
| | | | AFQGTRGLEPVASTPLLLIGNVAKNEIVIISETLTHNVKMV |
| | | | MVQLNETVTINCTRPNNNTRKSIRIGPGQAFPATATIEGDIR |
| | | | QAHCNINKTEWNNTLQKVREKLRKHFNKTIKFDSSSGGDP |
| | | | EITTHSFNCRGEFFYWDTTKLFNETYNNTDANGTIIMPCRI |
| | | | KQIINMWQKVGRAMYAPPIEGPITCISNITGLLLTHDGEEN |
| | | | DTETFRPWGGDMRDNWRSELYKYKVVEIKPLGIAPTKAK |
| | | | RRVVQREKRAALGAMFLGFLGAAGSTMGAASITLTVQAR |
| | | | QLLSGIVQQQSNLLRAIEAQQHLLQLTVWGIKQLQTRVLA |
| | | | IERYLKDQQLLGIWGCSGKLICTTAVPWNSSWSNKSQEEI |
| | | | WDNMTWMQWDREINNYTGIIYNLLEVSQNQQEKNEEDL |
| | | | LALDKWQNLWNWFDITQWLWYIKLFIMIVGGLIGLRIIFA |
| | | | VLSIVNRVRQGYSPLSFQTLIPNPRGPDRPGGIEEEGGEQD |
| | | | RDRSIRFVNGFLALAWDDLRSLCLFIYRQLRDLILIAARAV |
| | | | EILGQRGWETLKYLGSLVQYWGLELKKRAISMLDTTAIVV |
| | | | AEGTDRIIEVVQRTWRIICNILTRIRQGFEAALL |
| C.SE.08. | C | 259 | MRVMGIQRNYQRWWIWGILGFWMFMICNVRGNLWVTV |
| SE60021 | | | YYGVPVWKEADPTLFCASDAKAYEREVHNVWATHACVP |
| 3.KP411 | | | TDPSPQELVLENVTENFNMWKNGMVDQMHQDIISLWDQS |
| 834 | | | LKPCVKLTPLCVTLSCNNTIVVNATIRMIQKDCSFNTTTEL |
| | | | RDKRQTAYALFYKLDIVALSEKSSEYRLINCNTSAITQACP |
| | | | KVSFDPIPIHYCAPAGYAILKCRDANFNGTGPCKNVSTVQ |
| | | | CTHGIKPVVSTQLLLNGSLAENETIIRSENLTNNAKIIIVQL |
| | | | KTPVEINCTRPANNTRKSIRIGPGQTFYATEEIIGDIRQAHC |
| | | | NISGKTWNATLKDVGDKLKRHFPNGTIKFLPSSGGDIQITT |
| | | | HSFNCGGEFFYCCTSYLLNNTLDNNTINDTTNNGGTNDSII |
| | | | LQCRIKQIINVGQEVGRAMYAPPIKGNITCRSNITGILLAED |
| | | | GGPINETETFRRGGGDMRDNWRSELYKYKVVEIKPLGIAP |
| | | | TKAKRRVVGREKRAALGAMFLGFLGAAGSTMGAASITLT |
| | | | VQARQLLSGIVQQQSNLLRAIEAQQHMLQLTVWGIKQLQ |
| | | | TRVLALERYLRDQQLLGIWGCSGKLICTTAVPWNSSWSN |
| | | | RSQEEIWENMTWMQWDREINNYTNIIYELLEVSQNQQEK |
| | | | NEKDLLELDKWQNLWNWFDITHWLWYIKIFIMIVGGLIGL |
| | | | RIIFAVLSIVNRVRQGYSPLSFQTLIPNRRGPTSPGGLEEEGE |
| | | | DQDRGRSFRLVRGFLALPWDVLRTLCLFSSHRWRDLFWI |
| | | | AARAVELLDQRGWKTFNFLGTLVQYGGRKLKKSVISLFN |
| | | | TPPILVAEETDRFMKLFQRFGRAFSNIPGRLSQGLEAAFQ |
| C.ZA.99. | C | 260 | MRVRGILRNYPQWWIWGILGFWMIYNVMGNLWVTVYG |
| LT25.AY | | | VPVWKEAKTTLFCASDAKAYDREVHNIWATHACVPTDPN |
| 522727 | | | PQELVLKNVIENFNMWKNDMVDQMHEDIISLWDESLKPC |
| | | | VKLTPLCVTLNCTKVTVNGTASNSTATNDTATNGTNTVN |
| | | | STDATKTKIGNSTDDMKKCFFNVTTEIRDKEKKEHALFYK |
| | | | LDIVPLGNSSRNNYSEYRLINCNTSAITQACPKVNFDPIPIH |
| | | | YCAPAGYAILKCNDETFNGTGPCNNVSTVQCTHGIKPVVS |
| | | | TQLLLNGSLAEKETIIRSENLTENTKIIIVQLNRSVEINCTRP |
| | | | GNNTRTSIRIGPGQSFYATGEIIGDIRQAHCNISAKKWNETL |
| | | | QEVGKKLQEHFENKTIIFANSSGGDLEITTHSFNCRGEFFY |
| | | | CNTTSLFNNIYSNKTGSPNEKEIITLPCRIKQFINMWQKVG |
| | | | RAMYAPPIAGNITCKSNITGLLLLRDGGNFSRDNETFRPGG |
| | | | GDMRDNWRSELYKYKVVEIKPLGVAPTKAKRRVVEREK |
| | | | RAALGAVLIGFLGAAGSTMGAASMALTVQARQLLSGIVQ |
| | | | QQSNLLKAIEAQQHLLQLTVWGIKQLQARVLAIERYLKDQ |
| | | | QLLGIWGCSGKLICTTAVPWNSSWSNNRTHDYIWENMTW |
| | | | MQWDREVNDYTDTIYRLLEKSQNQQEENEKDLLALDSW |
| | | | NSLWNWFSITKWLWYIKIFIMIVGGLIGLRIIFTVLSLVNRV |
| | | | RQGYSPLSFQTLTPSPGGPDRLERIEEGGGEQDRSRSIRLVS |
| | | | GFLSLAWEDLRSLCLFSYHRLRDFILVTARAVELLGRSSLK |
| | | | GLQRGWEALKYLGSIVQYWGLELKKSAISLLDTIAITVAE |
| | | | GTDRIIEFIQSICRAIRNIPRRIRQGFETALL |
| C.ET.08. | C | 261 | MRVMGISRNCQQGWILGILGFWMLLMCNGTGNLWVTVY |
| ET165.K | | | YGVPVWKEANPTPPLFCASDAKAYETEVHNVWATHACV |
| U319549 | | | PTDPDPQELELKNVTEDFNMWKNGMVDQMHQDVISLWE |
| | | | QSLKPCVKMTPLCVTLNCTYVTSKNTTDNSTSTMLLSVNA |
| | | | TDSDMKNCSFNVTTELKDKQKKVYALFYLLDIRQLNDSS |
| | | | NTHTGNSSNTGNYSDYILINCNTSTIAQACPKVSFDPIPIPY |
| | | | CAPAGYAILKCNDKNFNGTGTCTNVSTVQCTRGIKPVVST |
| | | | PLLLNGSISEGDIVIISKNLTDNAKTIIVQLNQTVAVNCTRP |
| | | | TNNTRTGIRIGPGRAFYATGDIIRDIRQAHCNISGGDCNRTL |
| | | | EEVEKKLNESFSGNETIQFEPTSGGDPEITTRSFNCGGEFFY |
| | | | CKTSKLFIKTWKSWNHRNDGTIITIPCRIKQIIHMWQGVGR |
| | | | AMYAPPISGPITCRSNITGLLLTRDGGISDNNSTNTTEIFRR |
| | | | QGGDMKDNWRSELYKYKVVEIKPLGIAPTKAKRRMVQR |
| | | | ERGEKRHGAMFLGFLGAAGSTMGAASITLTVQARQLLSGI |
| | | | VQQQSNLLRAIEAQQHMLQLTVWGIKQLQTRVLALERYL |
| | | | RDQQLLGIWGCSGKIICTTAVPWNSSWSNKTHDQIWKNM |
| | | | TWMQWEREIDNYTGIIYNLLEVSQIQQEQNEQDLLALDK |
| | | | WQNLWSWFDITNWLWYIKIFIMIVGGLIGIRIIFAVLSIVNR |
| | | | VRQGYSPLSFQTLIPNPRGPDRPGGIEEEGGEQDRDRSVRL |
| | | | VNGFLALAWDDLRSLCLFCYHRLRDLILIAARVLELLGQR |
| | | | GWEALKYLKNIVQYWGLELKKSAVSLLDTVAIAVAEGTD |
| | | | RIIEVIQRAWRAFCNIPTRIRQGFEIALL |
| C.ZA.02. | C | 262 | MKVKGTRRNCQQWWIWGILGFWMVYNVVGNLWVTVY |
| 02ZAPS0 | | | YGVPVWREAKATLFCASDAKAYEKEVHNVWATHACVPT |
| 15MB1. | | | DPNPLERVLENVTENFNMWKNDMVDQMHEDIISLWDESL |
| DQ36999 | | | KPCVKLIPLCVTLNCTTAKNKSEEMNCSFKVTTELRDKKR |
| 5 | | | KEYALFYRLDVVPLNETNESSNDTNGDFREYRLINCNTST |
| | | | LTQACPKVTFDPIPIHYCAPAGYAILKCNNKTFNGTGPCNN |
| | | | VSTVQCTHGIKPVVSTQLLLNGSLAEEEIIIKSENITDNAKTI |
| | | | IVQLNKAIEIECIRPSNNTGRSVRIGPGQTFYTTGEIIGDIRQ |
| | | | AHCNISGNWDRTLYNISKKLGEHFPNKNISFKPSSGGDPEI |
| | | | TTHSFNCGGEFFYCDTSQLFNKTYNVTDDSNTTDTNNTIQ |
| | | | CRIKQIINMWQEVGRAMYAPPIAGSITCTSNITGLLLTRDG |
| | | | GGGTNSTSNTEEIFRPGGGNMKDNWRSELYKYKVVEVQP |
| | | | LGIAPTKAKRRVVEREKRAIGIGAVFLGFLGAAGSTMGAA |
| | | | SITLTVQARQLLSGIVQQQSNLLRAIEAQQHMLQLTVWGI |
| | | | KQLQARVLAIERYLKDQQLLGIWGCSGRQICTTNVPWNTS |
| | | | WSNKSLNDIWNNMTWMQWDKEISNYTNIIYQLLELSQNQ |
| | | | QEQNEKDLLALDKWQNLWSWFDITHWLWYIKIFIMIIGGL |
| | | | IGLRIIFAVLSIVNRVRQGYSPLSFQTLIPSQREPDRLGRIEE |
| | | | EGGEQDKDRSIRLVHGFLAIAWDDLRSLCLFSYHRLRGFIL |
| | | | VTTRVVGLLGQRGWEALKYLGSLVQYWGLELKKSAISLL |
| | | | DTIAIVVAEGTDRIIELILGICRAIRNLPRRIRQGFEAALL |
| C.ZA.09. | C | 263 | MRVRGTQMNCQGWWRWGIMIIGLIIICRAKEDLWVTVYY |
| 707PKE0 | | | GVPVWKDAETTLFCASDAKAYDTEKHNVWATHACVPTD |
| 2N3.HM | | | PNPQEIDLDNVTENFNMWKNGMVDQMHKDIINLWDQSL |
| 623589 | | | KPCVKLTPLCVTLNCTNININNSTDNGTSITNEIGDEIKNCS |
| | | | YNITTEFRDKRRRVSSLFYRHDIMPINEKNDSRTYILINCNT |
| | | | TTITQACPKVSFEPIPIHYCAPAGYAILKCKDKDFNGTGPC |
| | | | KNVSTVQCTHGIKPVVSTQLLLNGSLAEGGIKIRSENITNN |
| | | | AKTIIVQLDTPVKINCSRPNNNTRDRIGIGPGQAFFASNRIIG |
| | | | NIRQAHCNISASIWNMILQKVAEQLAKQFPNKNISFTNHSG |
| | | | GDLEITSHTFNCGGEFFYCNTSSLFNRTFPANYTYNRTADS |
| | | | TQGNTTITIPCRIKQIINMWQRVGQAMYAPPIEGVIRCESNI |
| | | | TGILLTRDGGNETNVEVFRPEGGNMRDNWRSELYNYKVV |
| | | | RIEPLGVAPTRARRRVVEREKRAVGLGAVFLGFLGAAGST |
| | | | MGAASITLTVQARQLLAGIVQQQSNLLQAIEAQQHLLKLT |
| | | | VWGIKQLQARVLALERYLRDQQLLGIWGCSGKTICTTTVP |
| | | | WNSSWSNKSQEEIWGNMTWLQWDKEISNYTDLIYVLLQE |
| | | | SQNQQDRNEQELLALDKWANLWNWFDISNWLWYIRIFIM |
| | | | VVGGLVGLRIVFAVISIVNRVRQGYSPLSLQTLTPNQEGLD |
| | | | RLGRIEEGGGEQGRGRSIRLVSGFFSLAWDDLRSLCLFSYH |
| | | | RLRDLVLIAARIVELLGSSLLKGLRLGLEGLNYLWNLLLY |
| | | | WGGELKTSAISLFDTTAIAVANWTDRAIELGQRICRAIRNI |
| | | | PRRIRQGFETALL |
| C.ET.08. | C | 264 | MRVRGISRNCQQGWIWGILGFWMLMICNVWGNLWVTVY |
| ET154.K | | | YGVPVWKEAKTTLFCASEAKAYETEVHNVWATHACVPT |
| U319545 | | | DPNPQEMTLENVTENFNMWKNDMVDQMHEDIISLWDQS |
| | | | LKPCVKLTPLCVTLNCTNATITGDGNNTDGTNGTARLLIY |
| | | | HGDIANCSFNETTELKDKVSKEHDLFYRLDVKPLNEEKNN |
| | | | STHNTSILINCSSSKVTHPCPKVSFDPIPIPYCAPAGYAILEC |
| | | | RDKAFSGTGPWPYVYTLQCPHGNWPVVSTQLLMYGFLSE |
| | | | NRRDNTNNITVHLSESVDIMCTRPSNNTRRRIIGIRPGRVS |
| | | | MMRGDMIIYLRATYCNIRDTRAACNITLRDVVDELHLQFD |
| | | | ETITIAPSSGGPPEDNTNSSTCGEDLCCCNTSQLIHSSICHNN |
| | | | PTSEPSKNRAANPTFIIPCRVKQVLSMRLVLREAMYAHPIS |
| | | | GDVLLTSDVGGLISTRDNANSANEIFRPGGGDMRDNWRS |
| | | | ELYKYKVVEIKPLGIAPTKAKRRVVEREKRAVGIGAVFLG |
| | | | FLGTAGSTMGAASITLTVQARQLLSGIVQQQSNLLKAIEA |
| | | | QQHMLQLTVWGIKQLQARVLAIEKYLQDQQLLGIWGCSG |
| | | | KLICTTTVPWNSSWSNKSLEEIWDNMTWMQWEREVGNY |
| | | | TEIIYKLLEDSQSQQEKNEKDLLALDNWNNLWSWFNISN |
| | | | WLWYIKIFIMIVGGLIGLRIIFAVLSMVRRVRQGYSPLSLQT |
| | | | LIPNPRGPDRLGGIEEEGGEQDRDRSVRLVSGFFSLAWDDL |
| | | | RSLILFLYHHLRDLLLIAARTVEILGQRGWEALKYLGSLVQ |
| | | | YWGLELKKSAISLLDTIAISVAEGTDRIIEIVQRIWRAIYNIP |
| | | | RRIRQGFEAALL |
| C.ET.08. | C | 265 | MRVKGTQQELSTLGWIWGILGFWMLLMNNVGGGKWGV |
| ET167.K | | | TYYEGVAGRKEATTTLCGAYDAKYDNDVQHVGWTTAG |
| U319550 | | | GVPTHPPPQEMLLNVVEDFFMMRNDEVEHMMDDDIILW |
| | | | QRLLPCCVTMTLCGAHSTCSNINSTATINDSDGGMTMCDF |
| | | | IRGEIKNCSFNITTDFRYKLDKEPALFYKPDLVPLNNDNSS |
| | | | YRLTNCNTSAGTQACPKASFDPIPAPYCAPAGYAILECNN |
| | | | GTFNGTRACNNVSTLECTHGIKPLVSTHLLLNENLANDIVI |
| | | | ISDNLTIIAVIIIVHLKNDGTIVCTRTSNSTRIRLRIGSGPVCY |
| | | | ATGEIIQDIRHAHDHISRSDWNDALRNVREHFRKHFPKFNT |
| | | | MRFTQSVGGNLQITTRRFNCVGEFFHCSTTGLFTDTYGTST |
| | | | CGTNSTGNTSGIHTITLHCKIKQFINMWQGVGLAMYAPSL |
| | | | AGNIICKSNFTGLVLTCDGGEGNNVTNLTETFRPGGGDMR |
| | | | DNWRSELYKYKVVEIKPLGVAPTKAKRRVVEREKRAVGI |
| | | | GAVFLGFLGAAGSTMGAASITLTVQARQLLSGIVQQQNNL |
| | | | LRAIEAQQHMLQLTVWGVKQLQARVLALERYLRDQQLL |
| | | | GIWGCSGKLICTTAVPWNTSWSNKSQEEIWNNMTWMQW |
| | | | EKEIDNYTDIIYKLLEVSQTQQEKNEKDLLALDSWQNLWN |
| | | | WFDISKWLWYIKIFIMIVGGLIGLRIIFAVLAIVNRVRQGYS |
| | | | PLSFQTLTPSPEGPDRLRGIEEEGGEQDRTRSIRLVSGFLAL |
| | | | AWDDLRSLCLFSYHRLRDFILIVVRAVELLGHRGWWETL |
| | | | KHLGSLELYKGVEIKKNAISLLKPTATAGAEGTVQIIEIVLR |
| | | | IIRSIFNLPRRVSQGFKAAQQ |
| C.ZA.06. | C | 266 | MRVMAIQRNCQHLLSWGTMILGILMICSAANNLWVTVYY |
| C.x.06.C | | | GVPVWRDAETTLFCASDAKAYDTEVHNVWATHACVPTD |
| F01 | | | PDPQEIDLKNVTEEFNMWKNNMVEQMHTDIISLWDQSLK |
| | | | PCVKLTHLCVTLNCSTANVNVTDYNITTGDKEEIKNCSFN |
| | | | MTTELSDKKQKVHSLFYRLDVVPIKPDNSDDNRSNSSYSN |
| | | | YRLINCNTSAITQACPKVTFDPIPIHYCAPAGFAILKCKDDG |
| | | | FNGTGPCKNVSSVQCTHGIKPVVSTQLLLNGSLAGKGIRIR |
| | | | SENITDNTKTIIVQLDKPVRINCTRPNNNTRKSMRIGPGQTF |
| | | | FATGDIIGDIRKAHCNISISEWNETLYKVAEQLGGIIGNKTV |
| | | | KFANSSGGDLEITTHSFNCGGEFFYCNTTDLFKGTWHPDN |
| | | | KTWSDPWNASMKSNNTSNVNITILCKIKQIVRMWQRVEQ |
| | | | AMYAPPIQGVISCSSNITGLLLTSDGGRDNSNNTGGQKNTE |
| | | | TFRPGGGNMRDNWRSELYKYKVVKIEPLGVAPTPARRRV |
| | | | VQREKRAVGLGAVFIGFLGAAGSTMGAASVTLTVQARQL |
| | | | LTGIVRQQSNLLKAIEAQQHLLRLTVWGIKQLQARVLAVE |
| | | | RYLKDQQLLGIWGCSGKLICTTNVPWNSSWSNKNQSEIW |
| | | | DNMTWLQWDKEINNYTQIIYDLLEESQNQQEKNEQELLA |
| | | | LDKWTNLWNWFNITNWLWYIKIFIMIVGGLIGLRIVFAVL |
| | | | SIINRVRQGYSPLSFQIHNPNPGGPDRLGRIEEEGGEQDRDR |
| | | | SIRLVSGFLALAWDDLRSLCLFSYHHLRDFILIAARTVEILL |
| | | | RRAWEGLKYLWNLLLYWSRELKISAISLFDTIAIAVAGWT |
| | | | DRVLEIGQAICRAILHIPRRIRQGLERLLL |
| C.ET.08. | C | 267 | MMVMGTLKNLSWGRIWGIGFFWMLMICNGEDTLWVTV |
| ET159.K | | | YYGAAVWKEATTTLCCAYDAIPYETELHVGWATPACVPT |
| U319547 | | | DPHPQEHVFENVLEPFIMWNDDMEQMMHDSIIYLCHRRL |
| | | | PPLVPLCVSQLCHEVDIYKNTTTANATSSMDVTVTEELKN |
| | | | CSFSTTTDIKDKKQKAYALFYKLDLAPLLIGDDIVINMSCT |
| | | | ASTVCRAGAFVPFPPIHCAPCAPAGFASRECKDNEVRGTR |
| | | | HGVTVHRGHGTHAMVPSPPLLLVGNGKQEKEDISDKSKN |
| | | | YANKVIILLLQLRTCEEIKCTKNTTKTRRSVRRGPFFASLEI |
| | | | RGEIRQAPRTNSASNGSAGITLIGEELLQHLDHNTIRSVPSS |
| | | | PCERETLTHTTPSCGWEVFYCVSIQICNGVYFTDTWTTYN |
| | | | SNDADYTDILTLTCRIKLIVNLSQELGRARSAPPIDGSVKCT |
| | | | SNFTGLVLTRAGGNATGDVTAENNTEIFRPGGGEMRDNW |
| | | | RSELYKYKVVEIKPLGVAPTEAKRRVVEREKRAVGIGAVF |
| | | | LGFLGAAGSTMGAASITLTVQARQLLSGIVQQQSNLLRAIE |
| | | | AQQHMLQLTVWGIKQLQTRVLAIERYLKDQQLLGIWGCS |
| | | | GKLICTTTVPWNASWSNKSYNEIWDNMTWMQWDREINN |
| | | | YTDTIYRLLEDSQNQQEKNERDLLALDSWNSLWNWFSISN |
| | | | WLWYIRIFIMIVGGLIGLRIIFAVLAIVNRVRQGYSPLSFQT |
| | | | LIPNPRGPDRPGGIEEEGGEQDRGRSIRLVHGFLALIWDDL |
| | | | RSLCLFCYRRLRDLTLIVARAVELLGQRGWEILKYWGNLV |
| | | | QYWVLQLKNSAISLLDTVAIPLAEGPDRILEVVQRFCRAIL |
| | | | NIPRRIRQGFEAALQ |

[0299] Notwithstanding the appended claims, the disclosure set forth herein is also defined by the following clauses:

[0300] Clause 1. A vaccine comprising a set of antigens that are representative of at least 60% of fifth order clades of a microbe.

[0301] Clause 2. A vaccine comprising a set of antigens of a microbe wherein the smallest pairwise edit distance between two of the antigens is at least 10% of the average size of the antigens and the largest pairwise edit distance between two of the antigens is no more than 98% of the average size of the antigens.

[0302] Clause 3. A vaccine comprising a set of antigens that are representative of at least 60% of all operational taxonomic units (OTUs) of the microbe.

[0303] Clause 4. The vaccine of clause 1 or clause 3, wherein an antigen is representative of a clade if its sequence is up to 40% of the average size of antigens of the represented clade different than other members of the represented clade.

[0304] Clause 5. The vaccine of clause 1 or clause 3, wherein an antigen is representative of a clade if the edit distance is up to 5% of the size of another strain of the represented clade.

[0305] Clause 6. The vaccine of clause 1 or clause 3, wherein an antigen is representative of a clade if its sequence is up to 20% of the average size of antigens of the represented clade different than at least 95%, 96%, 97%, 98%, or 99% of all strains of the represented clade.

[0306] Clause 7. The vaccine of clause 1 or clause 3, wherein an antigen is representative of a clade if its sequence is up to 10% of the average size of antigens of the represented clade different than at least 95%, 96%, 97%, 98%, or 99% of all strains of the represented clade.

[0307] Clause 8. The vaccine of clause 1 or clause 3, wherein the antigen is representative of a clade if the edit distance is up to 5% of the size of 95%, 96%, 97%, 98%, or 99% of all strains of the represented clade.

[0308] Clause 9. The vaccine of clause 1 or clause 3, wherein an antigen is representative of a clade if its sequence is up to 25 edit distance from all strains of the represented clade.

[0309] Clause 10. The vaccine of clause 1 or clause 3, wherein an antigen is representative of a clade if its sequence is up to 100 edit distance from all strains of the represented clade.

[0310] Clause 11. The vaccine of clause 1 or clause 3, wherein an antigen is representative of a clade if its sequence is present in the clade.

[0311] Clause 12. A vaccine composition comprising a set of antigens, wherein the antigens are derived from a library of variants of a microbe wherein: a. two antigens of the set with the greatest edit distance have an edit distance S; b. two antigens of the library with the greatest edit distance have an edit distance L; and c. S is at least 60% of L.

[0312] Clause 13. A vaccine composition comprising at least 4 influenza virus hemagglutinin antigen polypeptides, each represented by a sequence that is at least 20% identical, but not more than 95% identical, to the other influenza virus hemagglutinin antigen polypeptides, wherein each polypeptide comprises an antigen that is at least 90% identical among the 4 influenza virus hemagglutinin antigen polypeptides.

[0313] Clause 14. A vaccine composition comprising at least 4 influenza virus neuraminidase antigen polypeptides, each represented by a sequence that is at least 20% identical, but not more than 95% identical, to the other influenza virus neuraminidase antigen polypeptides, wherein each polypeptide comprises an antigen that is at least 90% identical among the 4 influenza virus neuraminidase antigen polypeptides.

[0314] Clause 15. A vaccine composition comprising at least 4 HIV gp160 antigen polypeptides, each represented by a sequence that is at least 20% identical, but not more than 95% identical, to the other HIV gp160 antigen polypeptides, wherein each polypeptide comprises an antigen that is at least 90% identical among the 4 HIV gp160 antigen polypeptides.

[0315] Clause 16. A vaccine composition comprising at least 4 HIV gp120 antigen polypeptides, each represented by a sequence that is at least 20% identical, but not more than 95% identical, to the other HIV gp120 antigen polypeptides, wherein each polypeptide comprises an antigen that is at least 90% identical among the 4 HIV gp120 antigen polypeptides.

[0316] Clause 17. A vaccine composition comprising at least 4 HIV gp41 antigen polypeptides, each represented by a sequence that is at least 20% identical, but not more than 95% identical, to the other HIV gp41 antigen polypeptides, wherein each polypeptide comprises an antigen that is at least 90% identical among the 4 HIV gp41 antigen polypeptides.

[0317] Clause 18. A vaccine composition comprising a set of antigens that activate an immune response in a subject to at least 6 strains identified in Table 1.

[0318] Clause 19. The vaccine composition of clause 13 or clause 18, wherein the immune response is detectable using head-specific antibodies in a hemagglutinin inhibition assay.

[0319] Clause 20. The vaccine composition of clause 19, wherein the immune response is at least 2-fold greater using the antigens than H1N1+H3N2+HAB, when tested using the hemagglutinin inhibition assay.

[0320] Clause 21. The vaccine composition of clause 14, wherein the immune response is at least 10-fold greater using the antigens than H1N1+H3N2+HAB, when tested using the hemagglutinin inhibition assay.

[0321] Clause 22. The vaccine composition of clause 19, wherein the immune response is at least 100-fold greater using the antigens than H1N1+H3N2+HAB, when tested using the hemagglutinin inhibition assay.

[0322] Clause 23. The vaccine of clause 1, clause 2, clause 3, or clause 12, wherein the microbe is a bacterium.

[0323] Clause 24. The vaccine of clause 1, clause 2, clause 3, or clause 12, wherein the microbe is a virus.

[0324] Clause 25. The vaccine composition of clause 24, wherein the virus is influenza.

[0325] Clause 26. The vaccine composition of clause 25, wherein the influenza is type A.

[0326] Clause 27. The vaccine composition of clause 25, wherein the influenza is type B.

[0327] Clause 28. The vaccine of clause 26, wherein the type A influenza is H1N1, H1N2, H3N1, H3N2, or H2N3.

[0328] Clause 29. The vaccine of clause 28, wherein the type A influenza is H1N1.

[0329] Clause 30. The vaccine of clause 28, wherein the type A influenza is H3N2.

[0330] Clause 31. The vaccine composition of clause 24, wherein the virus is human immunodeficiency virus (HIV).

[0331] Clause 32. The vaccine composition of clause 32, wherein the HIV is HIV-1.

[0332] Clause 33. The vaccine composition of clause 32, wherein the HIV-1 is of subclade A, subclade B, or subclade C.

[0333] Clause 34. The vaccine of clause 1, clause 2, clause 3, or clause 12, wherein the antigen is a broadly neutralizing antigen of surface exposed residues adjacent in tertiary space.

[0334] Clause 35. The vaccine composition of clause 34, wherein the broadly neutralizing antigen is in a stem of hemagglutinin.

[0335] Clause 36. The vaccine composition of clause 34, wherein the broadly neutralizing antigen is in a head of hemagglutinin.

[0336] Clause 37. The vaccine composition of clause 34, wherein the broadly neutralizing antigen is in a neuraminidase.

[0337] Clause 38. The vaccine composition of clause 34, wherein the broadly neutralizing antigen is in a gp160.

[0338] Clause 39. The vaccine composition of clause 34, wherein the broadly neutralizing antigen is in a gp120.

[0339] Clause 40. The vaccine composition of clause 34, wherein the broadly neutralizing antigen is in a gp41.

[0340] Clause 41. The vaccine of clause 1, clause 2, clause 3, or clause 12, wherein the antigen is a broadly conserved fragment of hemagglutinin.

[0341] Clause 42. The vaccine of clause 41, wherein the antigen is a broadly conserved fragment of a head of hemagglutinin.

[0342] Clause 43. The vaccine of clause 41, wherein the antigen is a broadly conserved fragment of a stem of hemagglutinin.

[0343] Clause 44. The vaccine of clause 1, clause 2, clause 3, or clause 12, wherein the antigen is a broadly conserved fragment of neuraminidase.

[0344] Clause 45. The vaccine of clause 1, clause 2, clause 3, or clause 12, wherein the antigen is a broadly conserved fragment of gp160.

[0345] Clause 46. The vaccine of clause 1, clause 2, clause 3, or clause 12, comprising at least one antigen selected from SEQ ID NOs:1-87.

[0346] Clause 47. The vaccine of clause 1, clause 2, clause 3, or clause 12, comprising at least one antigen that is at least 60% identical to any one of SEQ ID NOs:1-87.

[0347] Clause 48. The vaccine of clause 1, clause 2, clause 3, or clause 12, comprising at least one antigen that is at least 70% identical to any one of SEQ ID NOs:1-87.

[0348] Clause 49. The vaccine of clause 1, clause 2, clause 3, or clause 12, comprising at least one antigen that is at least 80% identical to any one of SEQ ID NOs:1-87.

[0349] Clause 50. The vaccine of clause 1, clause 2, clause 3, or clause 12, comprising at least one antigen that is at least 90% identical to any one of SEQ ID NOs:1-87.

[0350] Clause 51. The vaccine of clause 1, clause 2, clause 3, or clause 12, comprising at least one antigen selected from SEQ ID NOs:88-127.

[0351] Clause 52. The vaccine of clause 1, clause 2, clause 3, or clause 12, comprising at least one antigen that is at least 60% identical to any one of SEQ ID NOs:88-127.

[0352] Clause 53. The vaccine of clause 1, clause 2, clause 3, or clause 12, comprising at least one antigen that is at least 70% identical to any one of SEQ ID NOs:88-127.

[0353] Clause 54. The vaccine of clause 1, clause 2, clause 3, or clause 12, comprising at least one antigen that is at least 80% identical to any one of SEQ ID NOs:88-127.

[0354] Clause 55. The vaccine of clause 1, clause 2, clause 3, or clause 12, comprising at least one antigen that is at least 90% identical to any one of SEQ ID NOs:88-127.

[0355] Clause 56. The vaccine of clause 1, clause 2, clause 3, or clause 12, comprising at least one antigen selected from SEQ ID NOs:128-171.

[0356] Clause 57. The vaccine of clause 1, clause 2, clause 3, or clause 12, comprising at least one antigen that is at least 60% identical to any one of SEQ ID NOs:128-171.

[0357] Clause 58. The vaccine of clause 1, clause 2, clause 3, or clause 12, comprising at least one antigen that is at least 70% identical to any one of SEQ ID NOs:128-171.

[0358] Clause 59. The vaccine of clause 1, clause 2, clause 3, or clause 12, comprising at least one antigen that is at least 80% identical to any one of SEQ ID NOs:128-171.

[0359] Clause 60. The vaccine of clause 1, clause 2, clause 3, or clause 12, comprising at least one antigen that is at least 90% identical to any one of SEQ ID NOs:128-171.

[0360] Clause 61. The vaccine of clause 1, clause 2, clause 3, or clause 12, comprising at least one antigen selected from SEQ ID NOs:172-267.

[0361] Clause 62. The vaccine of clause 1, clause 2, clause 3, or clause 12, comprising at least one antigen that is at least 60% identical to any one of SEQ ID NOs:172-267.

[0362] Clause 63. The vaccine of clause 1, clause 2, clause 3, or clause 12, comprising at least one antigen that is at least 70% identical to any one of SEQ ID NOs:172-267.

[0363] Clause 64. The vaccine of clause 1, clause 2, clause 3, or clause 12, comprising at least one antigen that is at least 80% identical to any one of SEQ ID NOs:172-267.

[0364] Clause 65. The vaccine of clause 1, clause 2, clause 3, or clause 12, comprising at least one antigen that is at least 90% identical to any one of SEQ ID NOs:172-267.

[0365] Clause 66. The vaccine of clause 1, clause 2, clause 3, or clause 12, wherein the set of antigens comprise at least 5, 6, 7, 8, 9, 10, 15, 20, 30, 40, 50, 60, 70, 80, 90, 100, 200, 300, 400, 500, 600, 700, 800, 900 or 1000 different antigens.

[0366] Clause 67. The vaccine composition of clause 1, clause 2, clause 3, or clause 12, wherein the set of antigens comprises at least 30 antigens.

[0367] Clause 68. The vaccine composition of clause 1, clause 2, clause 3, or clause 12, wherein the set of antigens comprises at least 50 antigens.

[0368] Clause 69. The vaccine of clause 1, clause 2, clause 3, or clause 12, wherein the antigens have an average edit distance from each of the other antigens that is at least 5% of the average size of antigens in the clade.

[0369] Clause 70. The vaccine of clause 1, clause 3, or clause 12, wherein a smallest pairwise edit distance between two or more of the antigens in the set is no more than 1, and the largest pairwise edit distance is at least 5, 10, 20, 30, 40, 50, 60, 70, 80, 90, or 100.

[0370] Clause 71. The vaccine of clause 1, clause 3, or clause 4, wherein a smallest pairwise edit distance between two or more antigens in the set is no more than 5% of the size of the antigens, and the largest pairwise edit distance is at least 75% of the size of the antigens.

[0371] Clause 72. The vaccine of clause 1, wherein the clades are clades of a phylogenetic tree is a neighbor joining clustering tree or maximum parsimony tree.

[0372] Clause 73. The vaccine of clause 1, wherein a first order clade is a clade that is not subsumed in whole or in part within another higher-level clade.

[0373] Clause 74. The vaccine of clause 1, wherein each X-order clade is phylogenetically below X−1 number branch nodes in a phylogenetic tree of the microbe.

[0374] Clause 75. The vaccine of clause 1, further comprising antigens that are representative of at least 60% of each of third, fourth, fifth, sixth, seventh, eighth, ninth, tenth, eleventh, twelfth, thirteenth, fourteenth, or fifteenth order clades of the microbe.

[0375] Clause 76. The vaccine of clause 75, wherein a represented clade is a clade Y that is subsumed by a clade Y−1.

[0376] Clause 77. The vaccine of clause 1, wherein a representative clade is a node-based clade.

[0377] Clause 78. The vaccine of clause 1, wherein a representative clade is a stem-based clade.

[0378] Clause 79. The vaccine of clause 1, wherein a representative clade is apomorphy-based clade.

[0379] Clause 80. The vaccine of clause 1, wherein an average number of branches between each of the antigens in the set is at least 1, 3, 5, or 10.

[0380] Clause 81. The vaccine of clause 1, wherein a smallest number of branches between any two antigens in the set is no more than 1 and a largest number of branches between any two antigens in the set is at least 5, 10, or 15.

[0381] Clause 82. The vaccine of clause 3, wherein each OTU comprises sequences that are at least 95% homologous of one another.

[0382] Clause 83. The vaccine of clause 3, wherein each OTU comprises of at least 3 different sequences.

[0383] Clause 84. The vaccine composition of clause 1, clause 2, clause 3, or clause 12, wherein each of the antigens in the set shares at least 90%, 95, or 99% sequence identity to at least one other antigen in the set.

[0384] Clause 85. The vaccine composition of clause 1, clause 2, clause 3, or clause 12, wherein each of the antigens in the set shares at least 90%, 95, or 99% % sequence identity to at least one other antigen in the set over a length of at least 100 amino acids.

[0385] Clause 86. The vaccine composition of clause 1, clause 2, clause 3, or clause 12, wherein each of the antigens in the set differs from each of the other antigens in the set by at least 5% sequence identity.

[0386] Clause 87. The vaccine composition of clause 1, clause 2, clause 3, or clause 12, wherein each of the antigens in the set differs from each of the other antigens in the set by no more than 75% sequence identity.

[0387] Clause 88. The microbial vaccine composition of clause 1, clause 2, clause 3, or clause 12, wherein each antigen is a peptide comprising at least 10, 15, 20, 25, 30, 35, 40, 45, 50, 55, 60, 65, 70, 75, 80, 85, 90, 85, 100, 110, or 120 amino acids.

[0388] Clause 89. The vaccine composition of clause 1, clause 2, or clause 3, wherein the antigens are selected from Table 2, Table 3, Table 4, Table 5, or a fragment or homologue thereof.

[0389] Clause 90. The vaccine composition of clause 89, comprising 2 or more antigens from Table 2, Table 3, Table 4, Table 5, or fragments or homologues thereof.

[0390] Clause 91. The vaccine composition of clause 90, comprising 3 or more antigens from Table 2, Table 3, Table 4, Table 5, or fragments or homologues thereof.

[0391] Clause 92. The vaccine composition of clause 91, comprising 5 or more antigens from Table 2, Table 3, Table 4, Table 5, or fragments or homologues thereof.

[0392] Clause 93. The vaccine composition of clause 92, comprising 10 or more antigens from Table 2, Table 3, Table 4, Table 5, or fragments or homologues thereof.

[0393] Clause 94. The vaccine composition of clause 89, wherein the fragment comprises at most 10, 15, 20, 25, 30, 35, 40, 45, 50, 55, 60, 65, 70, 75, 80, 85, 90, 95, 100, 110, or 120 amino acids.

[0394] Clause 95. The vaccine composition of clause 89, wherein the fragment comprises at least 10, 15, 20, 25, 30, 35, 40, 45, 50, 55, 60, 65, 70, 75, 80, 85, 90, 95, 100, 110, or 120 amino acids.

[0395] Clause 96. The vaccine composition of clause 89, wherein the homologue comprises a sequence having at least 90% sequence identity to the antigen of Table 1.

[0396] Clause 97. The vaccine composition of clause 12, wherein the library comprises at least 1×10⁴, 1×10⁵, 1×10⁶ different variants of the microbe.

[0397] Clause 98. The vaccine composition of clause 12, wherein the library comprises at least 90% of all known sequences of the microbe.

[0398] Clause 99. A pharmaceutical composition comprising the vaccine composition of any of the preceding clauses and a pharmaceutically acceptable diluent, adjuvant, excipient, or any combinations thereof.

[0399] Clause 100. The vaccine composition of clause 99, wherein the vaccine is in a form of an aerosol formulation.

[0400] Clause 101. The vaccine composition of clause 99, wherein the vaccine is in a form of an injectable formulation.

[0401] Clause 102. The vaccine composition of any of the preceding clauses, wherein each of the antigens is at a concentration that alone does not provide a significant prophylactic immune response to the broadly neutralizing antigen in a subject; and collectively, the antigens have a combined concentration that provides an immune response to the broadly neutralizing antigen in the subject.

[0402] Clause 103. The vaccine composition of clause 102, wherein the subject is a bird.

[0403] Clause 104. The vaccine composition of clause 102, wherein the subject is a mammal.

[0404] Clause 105. The vaccine composition of clause 103, wherein the subject is a human.

[0405] Clause 106. The vaccine composition of clause 103, wherein the subject is a pig.

[0406] Clause 107. A virus like particle (VLP) comprising the vaccine composition of any of the preceding clauses.

[0407] Clause 108. A recombinant expression vector comprising a nucleic acid molecule encoding: (a) a set of antigens that are representative of at least 60% of each of first order clade and second order clades of a microbe; (b) set of antigens wherein the smallest pairwise edit distance between two of the antigens is no more than 25 and the largest pairwise edit distance between two of the antigens is at least 300; (c) set of antigens that are representative of at least 60% of all operational taxonomic units (OTUs) of the microbe; or (d) set of antigens that are representative of at least 60% of all operational taxonomic units (OTUs) of the microbe.

[0408] Clause 109. A recombinant expression vector comprising a nucleic acid molecule encoding: (a) a set of antigens that are representative of at least 60% of each of first order clade and second order clades of a microbe; (b) set of antigens wherein the smallest pairwise edit distance between two of the antigens is no more than 5% of the size of the antigens, and the largest pairwise edit distance is at least 75% of the size of the antigen; (c) set of antigens that are representative of at least 60% of all operational taxonomic units (OTUs) of the microbe; or (d) set of antigens that are representative of at least 60% of all operational taxonomic units (OTUs) of the microbe.

[0409] Clause 110. A method for treating or reducing the likelihood of an infection in a subject, comprising administrating to the subject a vaccine composition of any of the preceding clauses.

[0410] Clause 111. A method for treating or reducing the likelihood of a flu infection in a subject, comprising administrating to the subject a vaccine composition that results in an immune activation effective against seasonal flu for at least 3, 4, 5, 6, 7, 8, 9, or 10 years.

[0411] Clause 112. The method of clause 110 or clause 111, wherein the subject is a human.

[0412] Clause 113. The method of clause 110 or clause 111, wherein the subject is a domesticated animal.

[0413] Clause 114. A method for making a vaccine composition, comprising: selecting a set of antigens that are (a) representative of at least 60% of each of first order clade and second order clades of a microbe; (b) set of antigens wherein the smallest pairwise edit distance between two of the antigens is no more than 5% of the size of the antigens, and the largest pairwise edit distance is at least 75% of the size of the antigens; (c) representative of at least 60% of all operational taxonomic units (OTUs) of the microbe; or (d) representative of at least 60% of all operational taxonomic units (OTUs) of the microbe.

[0414] Clause 115. The method of clause 114, further comprising: obtaining a plurality of antigen sequences from a library of strains of the microbe; and aligning the plurality of antigen sequences to create a phylogenetic tree of the antigen.

[0415] The term “about,” as used herein, generally refers to a range that is 2%, 5%, 10%, or 15% greater than or less than (±) a stated numerical value within the context of the particular usage. For example, “about 10” would include a range from 8.5 to 11.5. As used herein, the terms “about” and “approximately,” when used to modify a numeric value or numeric range, indicate that deviations of up to about 0.2%, about 0.5%, about 1%, about 2%, about 5%, about 7.5%, or about 10% (or any integer between about 1% and 10%) above or below the value or range remain within the intended meaning of the recited value or range.

[0416] As used in this specification and the appended claims, the singular forms “a,” “an,” and “the” include plural references unless the context clearly dictates otherwise. Thus, for example, references to “a method” include one or more methods, and/or steps of the type described herein and/or which will become apparent to those persons skilled in the art upon reading this disclosure.

[0417] While preferred embodiments of the present invention have been shown and described herein, it will be obvious to those skilled in the art that such embodiments are provided by way of example only. Numerous variations, changes, and substitutions will now occur to those skilled in the art without departing from the invention. It should be understood that various alternatives to the embodiments of the invention described herein may be employed in practicing the invention. It is intended that the following claims define the scope of the invention and that methods and structures within the scope of these claims and their equivalents be covered thereby.

1-12. (canceled)

13. A vaccine composition comprising at least 4 influenza virus hemagglutinin antigen polypeptides, each polypeptide represented by an amino acid sequence that is at least 20% identical, but not more than 95% identical, to the other influenza virus hemagglutinin antigen polypeptides in the vaccine composition, wherein each polypeptide comprises an antigen that is at least 90% identical among the 4 influenza virus hemagglutinin antigen polypeptides.

14. A vaccine composition comprising at least 4 influenza virus neuraminidase antigen polypeptides, each polypeptide represented by an amino acid sequence that is at least 20% identical, but not more than 95% identical, to the other influenza virus neuraminidase antigen polypeptides in the vaccine composition, wherein each polypeptide comprises an antigen that is at least 90% identical among the 4 influenza virus neuraminidase antigen polypeptides.

15-25. (canceled)

26. The vaccine composition of claim 13, wherein the influenza is type A.

27. The vaccine composition of claim 13, wherein the influenza is type B.

28. The vaccine of claim 26, wherein the type A influenza is H1N1, H1N2, H3N1, H3N2, or H2N3.

29. The vaccine of claim 28, wherein the type A influenza is H1N1 or H3N2.

30-45. (canceled)

46. The vaccine composition of claim 13, comprising at least one antigen selected from SEQ ID NOs:1-87.

47. (canceled)

48. (canceled)

49. The vaccine composition of claim 13, comprising at least one antigen that is at least 80% identical to any one of SEQ ID NOs:1-87.

50-98. (canceled)

99. A pharmaceutical composition comprising (i) the vaccine composition of claim 13 and (ii) a pharmaceutically acceptable diluent, adjuvant, excipient, or any combinations thereof.

100-106. (canceled)

107. A virus like particle (VLP) comprising the vaccine composition of claim 13.

108-115. (canceled)

116. The vaccine composition of claim 14, wherein the antigen comprises at least one antigen selected from SEQ ID NOs:1-87.

117. The vaccine composition of claim 14, wherein the antigen at least one antigen that is at least 80% identical to any one of SEQ ID NOs:1-87.

118. A virus like particle (VLP) comprising the vaccine composition of claim 14.

119. A pharmaceutical composition comprising (i) the vaccine composition of claim 14 and (ii) a pharmaceutically acceptable diluent, adjuvant, excipient, or any combinations thereof.

120. The vaccine composition of claim 14, wherein the antigen is in a stem of hemagglutinin or in a head of hemagglutinin.

121. The vaccine composition of claim 13, wherein the antigen is in a stem of hemagglutinin or in a head of hemagglutinin.

122. The vaccine composition of claim 13, wherein the influenza is type A.

123. The vaccine composition of claim 13, wherein the influenza is type B.

124. The vaccine of claim 122, wherein the type A influenza is H1N1, H1N2, H3N1, H3N2, or H2N3.

125. A recombinant expression vector comprising a nucleic acid molecule encoding at least one antigen that is at least 80% identical to any one of SEQ ID NOs:1-267.

126. A virus like particle (VLP) comprising a vaccine composition, wherein the vaccine composition comprises at least one antigen that is at least 80% identical to any one of SEQ ID NOs:1-267.

127. A method for treating or reducing the likelihood of an infection in a subject, comprising administrating to the subject a vaccine composition, wherein the vaccine composition comprises at least one antigen that is at least 80% identical to any one of SEQ ID NOs: 1-267.

The application's sequence listing, which the Patent Office published only in electronic form, follows.

SEQUENCE LISTING (271 sequences)

SEQ ID NO: 1 - protein, 508 aa, Artificial Sequence
  Description of Artificial Sequence: Synthetic polypeptide
EDTICIGYHANNSTDTVDTVLEKNVTVTHSVNLLEDSHNGKLCKLKGIAPLQLGKCNIAGWLLGNPECDLLLTASSWSYIVETSNSENGTCYPGDFIDYEELREQLSSVSSFEKFEIFPKTSSWPNHETTKGVTAACSYAGASSFYRNLLWLTKKGSSYPKLSKSYVNNKGKEVLVLWGVHHPPTGTDQQSLYQNADAYVSVGSSKYNRRFTPEIAARPKVRDQAGRMNYYWTLLEPGDTITFEATGNLIAPWYAFALNRGSGSGIITSDAPVHDCNTKCQTPHGAINSSLPFQNIHPVTIGECPKYVRSTKLRMATGLRNIPSIQSRGLFGAIAGFIEGGWTGMIDGWYGYHHQNEQGSGYAADRKSTQNAIDGITNKVNSVIEKMNTQFTSVGKEFNHLEKRIENLNRKVDDGFLDVWTYNAELLVLLENERTLDYHDSNVKNLYEKVRSQLKNNAKEIGNGCFEFYHKCDDSCMESVKNGTYDYPKYSEESKLNREEIDGVKLES

SEQ ID NO: 2 - protein, 507 aa, Artificial Sequence
  Description of Artificial Sequence: Synthetic polypeptide
ADTICIGYHANNSTDTVDTIFEKNVAVTHSVNLLEDRHNGKLCKLKGIAPLQLGKCNIIGWLLGNPECDSLLPARSWSYIVETPNSENGACYPGDFIDYEELREQLSSVSSLERFEIFPKESSWPNHTFNGVTASCSHRGKSSFYRNLLWLTKKGDSYPKLTNSYVNNKGKEVLVLWGVHHPSSSDEQQSLYSNGNAYVSVASSNYNRRFTPEIAARPKVKDQHGRMNYYWTLLEPGDTIIFEATGNLIAPWYAFALSRGFESGIITSNASMHECNTKCQTPQGSINSNLPFQNIHPVTIGECPKYVRSTKLRMVTGLRNIPSIQSRGLFGAIAGFIEGGWTGMIDGWYGYHHQNEQGSGYAADQKSTQNAINGITNKVNSIIEKMNTQFTAVGKEFNNLEKRMENLNKKVDDGFLDIWTYNAELLVLLENGRTLDFHDLNVKNLYEKVKSQLKNNAKEIGNGCFEFYHKCDNECMESVRNGTYDYPKYSEESKLNREKIDGVKLES

SEQ ID NO: 3 - protein, 507 aa, Artificial Sequence
  Description of Artificial Sequence: Synthetic polypeptide
ADTICIGYHANNSTDTVDTVLEKNVTVTHSVNLLEDSHNGKLCRLKGIAPLQLGKCNIAGWLLGNPECDPLLPVRSWSYIVETPNSENGICYPGDFIDYEELREQLSSVSSFERFEIFPKESSWPNHNTNGVTAACSHEGKSSFYRNLLWLTEKEGSYPKLKNSYVNKKGKEVLVLWGIHHPPNSKEQQNLYQNENAYVSVVTSNYNRRFTPEIAERPKVRDQAGRMNYYWTLLKPGDTIIFEANGNLIAPMYAFALSRGFGSGIITSNASMHECNTKCQTPLGAINSSLPYQNIHPVTIGECPKYVRSAKLRMVTGLRNIPSIQSRGLFGAIAGFIEGGWTGMIDGWYGYHHQNEQGSGYAADQKSTQNAINGITNKVNTVIEKMNIQFTAVGKEFNKLEKRMENLNKKVDDGFLDIWTYNAELLVLLENERTLDFHDSNVKNLYEKVKSQLKNNAKEIGNGCFEFYHKCDNECMESVRNGTYDYPKYSEESKLNREKVDGVKLES

SEQ ID NO: 4 - protein, 508 aa, Artificial Sequence
  Description of Artificial Sequence: Synthetic polypeptide
ADTLCIGYHANNSTDTVDTVLEKNVTVTHSVNLLEDSHNGKLCRLGGIAPLQLGKCNIAGWLLGNPECDLLLTVSSWSYIVETSNSDNGTCYPGDFIDYEELREQLSSVSSFERFEIFPKTSSWPNHETTNGVTAACPYAGANSFYRNLLWLVKKGDSYPKLSKSYVNNKGKEVLVLWGVHHPPTSTEQQSLYQNADAYVSVGSSKYNRRFTPEIAARPKVRGQAGRMNYYWTLLEPGDTITFEATGNLVAPRYAFALNKGSGSGVITSDAPVHDCDTKCQTPHGAINSSLPFQNIHPVTIGECPKYVKSTKLRMATGLRNIPSIQSRGLFGAIAGFIEGGWTGMIDGWYGYHQQNGQGSGYAADQKSTQNAIDGITNKVNSVIEKMNTQFTAVGKEFNNLERRIENLNKKVDDGFLDVWTYNAELLVLLENERTLDFHDSNVKNLYEKVRSQLRNNAKEIGNGCFEFYHKCDNACMESVRNGTYDYPKYSEESKLNREEIDGVKLES

SEQ ID NO: 5 - protein, 507 aa, Artificial Sequence
  Description of Artificial Sequence: Synthetic polypeptide
ADTICIGYQANNSTDTVDTLLEKNVTVTHSVNLLEDSHNGKLCKLKGIAPLQLGKCNIAGWLLGNPECDSLLPARSWSYIVETPNSETGACYPGDFIDYEELREQLSSVSSLERFEIFPKESSWPNHNTTGVTKSCSHRGESSFYRNLLWLTKKGNSYPELNNSYVNNKGKEVLVLWGVHHPSNSNNQQTLYHNANAYVSVVSSNYNRRFTPEIAARPKVRDQTGRMNYYWTLLEPGDTIIFEATGNLIAPWYAFALSRGFGSGIITSNASMHECNTKCQTPQGAINSSLPFQNIHPVTIGECPKYVRSTKLRMVTGLRNIPSIQSRGLFGAIAGFIEGGWTGMIDGWYGYHHQNEQGSGYAADQKSTQNAINRITNKVNSVIEKMNTQFTAVGKEFNNLEKRMENLNKEVDDGFLDIWTYNAELLVLLENEMTLDFHDSNVKNLYEKVKSQLKNNAKEIGNGCFEFYHKCDNECMESVRNGTYDYPKYSEDSKLNREKIDGVKLEP

SEQ ID NO: 6 - protein, 508 aa, Artificial Sequence
  Description of Artificial Sequence: Synthetic polypeptide
ADTICIGYHANNSTDTVDTVLEKNVTVTHSVNLLEDSHNGKLCRLKGIAPLQLRKCNIAGWILGNPECESLLSERSWSYIVETPNSENGTCYPGDFTNYEELREQLSSVSSFERFEIFPKESSWPKHNTTRGVTAACSHAGKSSFYRNLLWLTEKDGSYPNLNNSYVNKKGKEVLVLWGVHHPSNIKDQQTLYQKENAYVSVVSSNYNRRFTPEIAERPKVRGQAGRMNYYWTLLKPGDTIMFEANGNLIAPWYAFALSRGFGSGIITSNASMHECDTKCQTPQGAINSSLPFQNIHPVTIGECPKYVRSTKLRMVTGLRNIPSIQSRGLFGAIAGFIEGGWTGMIDGWYGYHHQNEQGSGYAADQKSTQNAINGITNKVNSVIEKMNTQFTAVGKEFNNLEKRMENLNKKVDDGFLDIWTYNAELLILLENERTLDFHDSNVKNLYEKVKSQLRNNAKEIGNGCFEFYHKCNNECMESVKNGTYDYPKYSEESKLNREKIDGVKLES

SEQ ID NO: 7 - protein, 508 aa, Artificial Sequence
  Description of Artificial Sequence: Synthetic polypeptide
ADTICIGYHANNSTDTVDTVLEKNVTVTHSVNLLEDSHNGKLCRLKGIAPLQLGKCNIAGWILGNPECDSLLPASSWSYIVETPNSKNGICYPGDFIDYEELREQLSSVSSFERFEIFPKESSWPKHSTTKGVTAACSHAGKSSFYRNLLWLTKKEDSYPKLSNSYVNKKGKEVLVLWGVHHPSSSKEQQTLYQNENAYVSVVSSNYNRRFIPEIAERPEVKDQAGRINYYWTLLEPGDTIIFEANGNLVAPWYAFALSRGFGSGIITSNASMHECNTKCQTPQGAINSSLPFQNIHPVTIGECPKYVKSAKLRMVTGLRNIPSIQSRGLFGAIAGFIEGGWTGMIDGWYGYHHQNEQGSGYAADQKSTQNAINGITNKVNSVIEKMNTQFTAVGKEFNNLEKRMENLNKKVDDGFLDIWTYNAELLVLLENERTLDFHDSNVKNLYEKVKIQLKNNAKEIGNGCFEFYHKCDNECMESVRNGTYDYPKYSKESKLNREKIDGVKLES

SEQ ID NO: 8 - protein, 507 aa, Artificial Sequence
  Description of Artificial Sequence: Synthetic polypeptide
ADTICIGYHANNSTDTVDTVLEKNVTVTHSVNLLEDSHNGKLCRLKGKAPLQLGNCNIAGWVLGNPECESLLSNRSWSYIAETPNSENGTCYPGDFADYEELREQLSSVSSFERFEIFPKESSWPNHTTRGVTAACPHARKSSFYKNLVWLTEANGSYPNLSRSYVNNQEKEVLVLWGVHHPSNIEEQRALYRKDNAYVSVVSSNYNRRFTPEIAKRPKVRDQSGRMNYYWTLLEPGDTIIFEATGNLIAPWYAFALSRGPGSGIITSNAPLDECDTKCQTPQGAINSSLPFQNIHPVTIGECPKYVRSTKLRMVTGLRNIPSIQSRGLFGAIAGFIEGGWTGMMDGWYGYHHQNEQGSGYAADQKSTQNAINGITNKVNSVIEKMNTQFTAVGKEFNKLEKRMENLNKKVDDGFMDIWTYNAELLVLLENERTLDFHDSNVKNLYEKVKNQLRNNAKELGNGCFEFYHKCDNECMESVKNGTYDYPKYSEESKLNREKIDGVKLES

SEQ ID NO: 9 - protein, 508 aa, Artificial Sequence
  Description of Artificial Sequence: Synthetic polypeptide
ADTLCIGYHANNSTDTVDTVLEKNVTVTHSVNLLEDRHNGKLCKLGGIAPLHLGKCNIAGWLLGNPECELLLTVSSWSYIVETSNSDNGTCYPGDFINYEELREQLSSVSSFERFEIFPKTSSWPNHETNRGVTAACPYAGANSFYRNLIWLVEKGNSYPKLSKSYVNNKGKEVLVLWGIHHPPTSTDQQSLYQNADAYVFVGSSKYNRKFKPEIAARPKVRGQAGRMNYYWTLIEPGDTITFEATGNLVVPRYAFAMNRGSGSGIIISDAPVHDCNTKCQTPKGAINTSLPFQNIHPVTIGECPKYVKSTKLRMATGLRNIPSIQSRGLFGAIAGFIEGGWTGMIDGWYGYHHQNEQGSGYAADQRSTQNAIDGITNKVNSVIEKMNTQFTAVGKEFNHLEKRIENLNKKVDDGFLDIWTYNAELLVLLENERTLDFHDSNVKNLYEKVRSQLRNNAKEIGNGCFEFYHKCDDTCMESVKNGTYDYPKYSEESKLNREEIDGVKLES

SEQ ID NO: 10 - protein, 508 aa, Artificial Sequence
  Description of Artificial Sequence: Synthetic polypeptide
ADTICIGYHANNSTDTVDTVLEKNVTVTHSVNLLEDSHNGKLCRLKGIAPLQLGKCNIAGWILGNPECESLFSKKSWSYIAETPNSENGTCYPGYFADYEELREQLSSVSSFERFEIFPKESSWPKHNVTRGVTASCSHKGKSSFYRNLLWLTEKNGSYPNLSKSYVNNKEKEVLVLWGVHHPSNIEDQKTIYRKENAYVSVVSSNYNRRFTPEIAERPKVRGQAGRINYYWTLLEPGDTIIFEANGNLIAPWHAFALNRGFGSGIITSNASMDECDTKCQTPQGAINSSLPFQNIHPVTIGECPKYVRSTKLRMVTGLRNIPSIQSRGLFGAIAGFIEGGWTGMIDGWYGYHHQNEQGSGYAADQKSTQNAINGITNKVNSVIEKMNTQFTAVGKEFNKLEKRMENLNKKVDDGFLDIWTYNAELLVLLENERTLDFHDSNVKNLYEKVKSQLKNNAKEIGNGCFEFYHKCNNECMESVKNGTYDYPKYSEESKLNREKIDGVKLES

SEQ ID NO: 11 - protein, 508 aa, Artificial Sequence
  Description of Artificial Sequence: Synthetic polypeptide
ADTICIGYHANNSTDTVDTVLEKNVTVTHSVNLLEDSHNGKLCRLKGIAPLQLGNCSIAGWILGNPECESLFSKKSWSYIAETPNSENGTCYPGYFADYEELREQLSSVSSFERFEIFPKESSWPNHTVTKGVTASCSHKGKSSFYRNLLWLTEKNGSYPTLSKSYVNNKEKEVLVLWGVHHPSNIGDQRAIYHTENAYVSVVSSHYNRRFTPEIAKRPKVRGQEGRINYYWTLLEPGDTIIFEANGNLIAPWYAFALSRGFGSGIITSNASMDECDAKCQTPQGAINSSLPFQNVHPVTIGECPKYVRSTKLRMVTGLRNIPSIQSRGLFGAIAGFIEGGWTGMIDGWYGYHHQNEQGSGYAADQKSTQNAINGITNKVNSVIEKMNTQFTAVGKEFNKLERRMENLNKKVDDGFLDIWTYNAELLVLLENERTLDFHDSNVKNLYEKVKSQLKNNAKEIGNGCFEFYHKCNNECMESVKNGTYDYPKYSEESKLNREKIDGVKLES

SEQ ID NO: 12 - protein, 508 aa, Artificial Sequence
  Description of Artificial Sequence: Synthetic polypeptide
ADTICIGYHANNSTDTVDTVLEKNVTVTHSVNLLEDSHNGKLCRLKGIAPLQLGNCSVAGWILGNPKCESLFSKESWSYIAETPNPENGTCYPGYFADYEELREQLSSVSSFERFEIFPKESSWPNHTVTKGVTTSCSHNGKSSFYRNLLWLTEKNGLYPNLSKSYVNNKEKEVLVLWGVHHPSNIRDQRAIYHTENAYVSVVSSHYSRRFTPEIAKRPKVRGQEGRINYYWTLLEPGDTIIFEANGNLIAPWYAFALSRGFGSGIITSNASMDECDAKCQTPQGAINSSLPFQNVHPVTIGECPKYVRSTKLRMVTGLRNIPSIQSRGLFGAIAGFIEGGWTGMIDGWYGYHHQNEQGSGYAADQKSTQNAINGITNKVNSVIEKMNTQFTAVGKEFNKLERRMENLNKKVDDGFLDIWTYNAELLVLLENGRTLDFHDSNVKNLYEKVKSQLKNNAKEIGNGCFEFYHKCNNECMESVKNGTYDYPKYSEESKLNRGKIDGVKLES

SEQ ID NO: 13 - protein, 508 aa, Artificial Sequence
  Description of Artificial Sequence: Synthetic polypeptide
ADTICVGYHANNSTDTVDTILEKNVTVTHSVNLLENNHNGKLCSLNGIAPLQLGDCNVAGWILGNPECDSLLTANSWSYIIETSNSENGTCYPGEFADYEELRELLSSVSSFERFEIFPKATSWPNHETTKGVTAACSHSGARSFYRNLLWIVKKGNSYPKLSKSYTNNRRKEVLVIWGVHHPPTNNDQQSLYQNADAYVSVGSSKYYRRFTPEIADRPKVRGQAGRMNYYWTMLDQGDTITFEATGNLIAPWYAFALNKGLSSGIIMSDAPVHNCTTRCQTPYGALNSNLPFQNVHPITIGKCPKYVKSTQLRMATGLRNVPSIQSRGLFGAIAGFIEGGWTGMVDGWYGYHHQNEQGSGYAADQKSTQNAIDGISNKVNSIIEKMNIQFTSVGKEFNDLEKRVENLNKKVDDGFLDVWTYNAELLVLLENERTLDFHDFNVRNLYEKVKSQLRNNAKEVGNGCFEFYHKCDDECMESVRNGTYNYPKYSEESKLNREKIDGVKLES

SEQ ID NO: 14 - protein, 507 aa, Artificial Sequence
  Description of Artificial Sequence: Synthetic polypeptide
ADTICIGYHANNSTDTVDTVLEKNVTVTHSVNLLEDSHNGKLCLLKGIAPLQLGNCSVAGWILGNPECESLISKESWSYIVETPNPENGTCYPGYFADYEELREQLSSVSSFERFEIFPKESSWPNHTVTGVTASCSHNGKSSFYRNLLWLTEKNGLYPNLSNSYVNNKEKEVLVLWGVHHPSNIRDQRAIYHTENAYVSVVSSHYSRRFTPEIAKRPKVRGQEGRINYYWTLLEPGDTIIFEANGNLIAPWYAFALSRGFGSGIITSNAPMNECDAKCQTPQGAINSSLPFQNVHPVTIGECPKYVRSTKLRMVTGLRNIPSIQSRGLFGAIAGFIEGGWTGMMDGWYGYHHQNEQGSGYAADQKSTQNAINGITNKVNSVIEKMNTQFTAVGKEFNKLERRMENLNKKVDDGFLDIWTYNAELLVLLENERTLDFHDSNVKNLYEKVKSQLKNNAKEIGNGCFEFYHKCNNECMESVKNGTYDYPKYSEESKLNREKIDGVKLES

SEQ ID NO: 15 - protein, 508 aa, Artificial Sequence
  Description of Artificial Sequence: Synthetic polypeptide
ADTICIGYHANNSTDTVDTVLEKNVTVTHSVNLLENNHNGKLCNLNGIAPLQLGKCNVAGWLLGNPECGLLLNANAWSYIIETSDSKNGTCYPGDFIDYEELREQLGSVSSFEKFEIFPKASSWPDHETTKGTTAACPYSGVESFYRNLLWIIKKGNSYPKISKSYTNNRGKEVLVLWGVHHPPTTSDQQTLYQNIDAYVSVGSSKYNRRFTPEIATRPKVRGLAGRMNYYWTLLDQGDTIMFEATGNLIAPWYAFALNKGSDSGIITSDTPVHDCDTKCQTPYGALNSSLPFQNVHPITIGECPKYVKSTKLRMATGLRNVPSIQSKGLFGAIAGFIEGGWTGMIDGWYGYHHQNEQGSGYSADQKSTQNAIDGITNKVNSVIEKMNTQFTAVGKEFNNLERRIENLNKKVDDGFLDVWTYNAELLVLLENERTLDFHDSNVRDLYERVKSQLRNNAKEIGNGCFEFYHKCDDECMENVKNGTYDYPKYSEEAKLNREKIDGVKIES

SEQ ID NO: 16 - protein, 507 aa, Artificial Sequence
  Description of Artificial Sequence: Synthetic polypeptide
ADTICIGYHANNSTDTVDTIFEKNVAVTHSVNLLEDSHNGKLCLLKGIAPLQLGNCSVAGWILGNPECELLISKESWSYIVETPNPENGTCYPGYFADYEELREQLSSVSSFERFEIFPKESSWPNHTVTGVSASCSHNGKSSFYRNLLWLTGKNGLYPNLSKSYANNKEKEVLVLWGVHHPPNIGDQQGLYSNGNAYVSVASSNYNRRFTPEIAARPKVKDQHGRMNYYWTLLEPGDTIIFEATGNLIAPWYAFALSRGFESGIITSNASMHECNTKCQTPQGSINSNLPFQNIHPVTIGECPKYVRSAKLRMVTGLRNIPSIQSRGLFGAIAGFIEGGWTGMVDGWYGYHHQNEQGSGYAADQKSTQNAINGITNKVNSVIEKMNTQFTAVGKEFNRLERRMENLNKKVDDGFLDIWTYNAELLVLLENERTLDFHDSNVKNLYEKVKSQLKNNAKEIGNGCFEFYHKCNNECMESVKNGTYDYPKYSEESKLNREKIDGVKLES

SEQ ID NO: 17 - protein, 508 aa, Artificial Sequence
  Description of Artificial Sequence: Synthetic polypeptide
ADTLCIGYHANNSTDTVDTVLEKNVTVTHSVNLLENKHNGKLCKLRGVAPLHLGKCNIAGWLLGNPECESLFEASSWSYIVETPNSDNGTCYPGDFINYEELREHLSSVSSFERFEIFPKANSWPNHDTDSGVTASCPYAGAKSFYRNLIWLVKKGSSYPKLSKSYINDKKKEVLVIWGIHHPPNSTDQQTLYQNADAYVFVGSSKYSKRFKPEIAARPKVRDQAGRMNYYWTLIEPGDTITFEATGNLVVPRYAFAMTRGSGSGIIISDTPVHDCNTTCQTPKGAINTSLPFQNIHPVTIGECPKYVKSTKLKMATGLRNIPSIQSRGLFGAIAGFIEGGWTGMIDGWYGYHHQNEQGSGYAADQKSTQNAIDGITNKVNSVIEKMNTQFTAVGKEFNQLEKRIESLNNKVDDGFLDIWTYNAELLVLLENERTLDYHDSNVKNLYEKVRSQLKNNAKEIGNGCFEFYHKCDDTCMESVKNGTYDYPKYSEEAKLNREEIDGVKLES

SEQ ID NO: 18 - protein, 508 aa, Artificial Sequence
  Description of Artificial Sequence: Synthetic polypeptide
ADTLCIGYHANNSTDTIDTVLEKNVTVTHSVNLLENKHNGKLCKLGGMTPLHLGKCNIAGWLLGNPECELLSTVSSWSYIVETPYSDNGTCYPGDFTNYEELREQLSSVSSFERFEIFPKASSWPNHETNRGVTSACPYAGENDFYRNLLWLVKKGNSYPKLSKSYVNNKGKEVLILWGIHHPPTSADQQSLYQNADAYVFVGTSTYNRRFTPEVAARPKVRGQAGRMDYYWTLIGPGDTITFEATGNLVVPRYAFAMNRGSGSGIIISDIPFHNCTTKCQTPKGAINTSLPFQNVHPVTIGECPKYVKSTKLRMVTGLRNIPSIQSRGLFGAIAGFIEGGWTGMIDGWYGYHHQNEQGSGYAADQKSTQNAIDKITNKVNSVIEKMNTQFTAVGKEFNHLERRIENLNRKVDDGFLDVWTYNAELLILLENERTLDLHDSNVKNLYEKVKSQLRNNAKEIGNGCFEFYHKCDDACMESVRNGTYDYPKYSEESRLNREEIDGVKLES

SEQ ID NO: 19 - protein, 508 aa, Artificial Sequence
  Description of Artificial Sequence: Synthetic polypeptide
ADTLCIGYHANNSTDTVDTILEKNVTVTHSVNLLEDRHNGKLCKLRGVAPLHLGKCNIAGWLLGNPECESLFTARSWSYIVETSNSDNGTCYPGDFINYEELREQLSSVSSFERFEIFPNTSSWPNHDTNRGVTAACPHAGTKSFYRNLIWLVKKGDSYPKISKSYINNKEKEVLVLWGIHHPSTSADQQSLYQNADAYVFVGSSKYSKKFKPEIATRPKVRDQEGRMDYYWTIVEPGDKITFEATGNLVVPRYAFELKRNSGSGIIISDTSVHDCNTTCQTPKGAINTSLPFQNIHPVTIGECPKYVKSTKLRMATGLRNIPSIQSRGLFGAIAGFIEGGWTGMIDGWYGYHHQNEQGSGYAADLKSTQNAIDGITNKVNSIIEKMNTQFTAVGKEFSHLEKRIENLNKKVDDGFLDIWTYNAELLVLLENERTLDYHDSNVKNLYEKVKSQLKNNAKEIGNGCFEFYHKCDDMCMESVKNGTYDYPKYSEEAKLNREEIDGVKLES

SEQ ID NO: 20 - protein, 508 aa, Artificial Sequence
  Description of Artificial Sequence: Synthetic polypeptide
ADTICVGYHANNSTDTVDTILEKNVTVTHSVNLLESNHNGKLCSLNGKAPLQLGNCNVAGWILGNPECDLLLTANSWSYIIETSNSKNGACYPGEFADYEELRELLSTVSSFERFEIFPKATSWPHHETTKGTTVACPHSGVNSFYRNLLWIVKKGNSYPKLSKSYTNSKGKEVLVIWGVHHPPTDSDQQTLYQNNHTYVSVGTSKYYRRFTPEIVARPKIREQAGRMNYYWTLLDQGDTITLEATGNLIVPWHAFALNKGSNSGIMISDADFHNCTTKCQTPHGALKSNLPFQNVHPITIGECPKYVKSTQLRMATGLRNVPSIQSRGLFGAIAGFIEGGWTGMIDGWYGYHHQNEQGSGYAADQKSTQIAIDGISNKVNSVIEKMNIQFASVGKEFNDLEKRIENLNKKVDDGFVDVWTYNAELLILLENERTLDFHDFNVKNLYEKVKSQLRNNAKEIGNGCFEFYHKCDNECMESVKNGTYNYPKYSEESKLNREEIDGVKLES

SEQ ID NO: 21 - protein, 508 aa, Artificial Sequence
  Description of Artificial Sequence: Synthetic polypeptide
ADTLCIGYHANNSTDTVDTILEKNVTVTHSVNLLEDKHNGRLCKLGGIAPLNLGRCNIAGWLLGNPECESLFTVSSWSYIVETSNSYNGTCYPGDFINYEELREQLSSVSSFERFEIFPMASSWPNHETTKGVTAACSHAGENSFYRNLIWLVKKENTYPKISKSYINNKGKEVLVLWGIHHPPTNNDQQSLYQNADTYVFVGTSKYNKKFKPEIATRPKVRDQAGRMNYYWTLVEPGDTITFEATGNLVAPRYAFAMNKGSGSGIIVSDIPAHDCNTNCQTPKGAINTSLPFQNVHPVTIGECPKYVKSTRLRMATGLRNIPSIQSRGLFGAIAGFIEGGWTGMIDGWYGYHHQNGQGSGYAADQKSTQNAIDGITNKVNSVIEKMNTQFTAVGKEFNHLEKRIENLNKKVDDGFLDVWTYNAELLILLENERTLDFHDSNVKNLYEKARRQLKNNAKEIGNGCFEFYHKCDNACMESVKNGTYDYPKYSEESRLNREEIDGVKLDS

SEQ ID NO: 22 - protein, 508 aa, Artificial Sequence
  Description of Artificial Sequence: Synthetic polypeptide
ADTLCIGYHANNSTDTVDTVLEKNVTVTHSVNLLENKHDGKLCKLRGIAPLHLGKCNIAGWILGNPECESLFTTSSWSYIVETPNSDNGTCYPGDFINYEELREHLSSVSSFERFEIFPKANSWPYHDTNKGVTAACPYAGANSFYRNLIWLVKKGNSYPKLSKSYINNKKKEVLVIWGIHHPPTSTDQQTLYQNADAYVFVGSSKYSKRFKPEIAARPKVRDQAGRMDYYWTLIEPGDTITFEATGNLVVPRYAFTMKRGSGSGIIVSDAPVHDCNTTCQTPKGAINTSLPFQNIHPVTIGECPKYVKSTKLRMATGLRNIPSIQSRGLFGAIAGFIEGGWTGMIDGWYGYHHQNEQGSGYAADQKSTQNAIDGITNKVNSIIEKMNTQFTAVGKEFSQLEKRIESLNNKVDDGFLDIWTYNAELLVLLENERTLDYHDSNVKNLYEKVRSQLKNNAKEIGNGCFEFYHKCDDTCMESVKNGTYDYPKYSEEAKLNRQEIDGVKLES

SEQ ID NO: 23 - protein, 508 aa, Artificial Sequence
  Description of Artificial Sequence: Synthetic polypeptide
ADTLCIGYHANNSTDTVDTILEKNVTVTHSVNLLEDRHNGKLCNLRGEAPLHLGKCNIAGWLLGNPECELLFAVNSWSYIVETSNSDNGTCYPGDFTSYEELREQLSSVSSFERFEIFPKASSWPNHETNRGVTAACPYAGTNSFYRNLIWLVKKGNSYPKLSKSYVNNKKKEVLVLWGIHHPPTNADQQSLYQNADAYVFVGSSKYNKKFKPEIAKRPKVRGQAGRMNYYWTLVEPGDTITFEATGNLVAPRYAFAMNRDPGSGIITSDAPIHDCNATCQTPKGAINTSLPFQNIHPITIGECPKYVKSTRLRMATGLRNIPSIQSRGLFGAIAGFIEGGWTGMIDGWYGYHHQNGQGSGYAADQKSTQNAIDRITNKVNSVIEKMNIQFTAVGKEFNHLERRIENLNKKVDDGFLDVWTYNAELLVLLENERTLDFHDSNVKTLYEKVKTQLRNNAKEIGNGCFEFYHKCDDTCMESIKNGTYDYPKYSKESKLNREEIDGVQLES

SEQ ID NO: 24 - protein, 508 aa, Artificial Sequence
  Description of Artificial Sequence: Synthetic polypeptide
ADTLCVGYHANNSTDTVDTVLEKNVTVTHSVNLLEDNHNGKLCKLRGIAPLHLGKCNIAGWLLGNPECELLFTAKSWSYIVETSNPDNGICYPGDFSNYEELREQLSSVSSFERFEIFPNASSWPNHETNRGITAACPYAGANSFYRNLIWLVKKGNSYPKINKSYINNKGKEVLVLWGIHHPSTSNDQQSLYQNADAYVFVGSSKYNRRFKPEIATRPKVRDQAGRMNYYWTLVEPGDTITFEATGNLIAPRYAFAMTRGSGSGIMISDTPVYDCNTICQTPKGAINTSLPFQNIHPVTIGKCPKYVKSTKLRLATGLRNIPSIQYRGLFGAIAGFIEGGWTGMVDGWYGYHHQNEQGSGFAADRKSTQNAIDGITNKVNSVIEKVNTQFTAVGKEFNHLEKRIENLNKKVDDGFLDVWTYNAELLVLLENERTLDFHDSNVKNLYEKVRSQLRNNAKEIGNGCFEFYHKCDNTCMESVKNGTYDYPRYSEESKLNREEIDGVKLES

SEQ ID NO: 25 - protein, 508 aa, Artificial Sequence
  Description of Artificial Sequence: Synthetic polypeptide
ADTICVGYHANNSTDTVDTILEKNVTVTHSVNILETTHNGKLCSLSGIAPLQLGNCNIAGWILGNPECDLLLTVNSWSYIIETSNSVNGTCYPGEFADYEELREQLSSVASFERFEIFPKTTSWPNHETTRGTTAACSHSGTRSFYRNLLWIVKKGNSYPKISKSYTNKKGKEVLVIWGVHHPPTNNDQQSLYQNAYTYVSVESSKYYRRFTPEIASRPKVRGQEGRMNYYWTLLDQGDTITFEATGNLIAPWYAFALNKGSDSGIIISDAQVHNCTTKCQTPHGALNSTLPFQNVHPITIGECPKYVKSTHLRMATGLRNVPSIQSRGLFGAIAGFIEGGWTGMIDGWYGYHHQNEQGSGYAADKKSTQIAIDGISNKVNSVIEKMNIQFTSVGKEFNNLEKRIENLNKKVDDGFLDIWTYNAELFVLLENERTLDFHDFNVKNLYERVKSQLRNNAKEVGNGCFEFYHKCDNECMESVKNGTYNYPKYSEESKLNREEIDGVKLES

SEQ ID NO: 26 - protein, 508 aa, Artificial Sequence
  Description of Artificial Sequence: Synthetic polypeptide
ADTLCIGYHANNSTDTVDTVLEKNITVTHSVNLLEDKHNGKLCKLRGVAPLHLGKCNIAGWLLGNPECESLFNVSSWSYIVETSNSDNGTCYPGDFTNYEELKEQLSSVSSFERFEIFPKEGSWPNHETNRGVTAACPHAGANSFYKNLIWLVKRGNSYPKLNKSYVNNKKKEVLVLWGIHHPPTSTDQQSLYQNADAYVFVGSSKYSKKFKPEIATRPKVRDQAGRMNYYWTLVEPEDTITFEATGNLVVPRYAFAMNRGSGSGIITSDTPVHDCNTTCQTPKGAINTSLPFQNVHPITIGECPKYVKSTKLRMATGLRNIPSIQSRGLFGAIAGFIEGGWTGMIDGWYGYHHQNGQGSGYAADQKSTQNAIDGVTNKVNSIIEKMNTQFAAVGKEFNHLEKRIENLNKKVDDGFLDVWTYNAELLVLLENERTLDFHDSNVRNLYDKVRSQLRNNAKEIGNGCFEFYHKCDDTCMESVKNGTYDYPKYSEESKLNREEIDGVRLDS

SEQ ID NO: 27 - protein, 507 aa, Artificial Sequence
  Description of Artificial Sequence: Synthetic polypeptide
ADTICIGYHANNSTDTVDTVLEKNVTVTHSVNLLEDSHNGKLCLLKGIAPLQLGNCSVAGWILGNPECELLISRESWSYIVEKPNPENGTCYPGHFADYEELREQLSSVSSFERFEIFPKESSWPNHTTTGVSASCSHNGESSFYKNLLWLTGKNGLYPNLSKSYANNKEKEVLVLWGVHHPPNIGDQRALYHKENAYVSVVSSHYSRKFTPEIAKRPKVRDQEGRINYYWTLLEPGDTIIFEANGNLIAPRYAFALSRGFGSGIINSNAPMDECDAKCQTPQGAINSSLPFQNVHPVTIGECPKYVRSAKLRMVTGLRNIPSIQSRGLFGAIAGFIEGGWTGMVDGWYGYHHQNEQGSGYAADQKSTQNAINGITNKVNSVIEKMNTQFTAVGKEFNKLERRMENLNKKVDDGFIDIWTYNAELLVLLENERTLDFHDSNVKNLYEKVKSQLKNNAKEIGNGCFEFYHKCNDECMESVKNGTYDYPKYSEESKLNREKIDGVKLES

SEQ ID NO: 28 - protein, 508 aa, Artificial Sequence
  Description of Artificial Sequence: Synthetic polypeptide
ADTLCIGYHANNSTETVDTVLEKNVTVTHSINLLEDKHNGKLCRLRGVTPLHLGKCNIAGWLLGNPECESLSTASSWSYIVETSNSDNGTCYPGDFINYEELREQLSSVSSFERFEIFPNASSWPDHETNKGVTAACPHAGAKSFYRNLLWLVKKKNSYPKLSKSYINNKGKEVLVLWGIHHPSNIQDQETLYQNADTYVFVGSSKYSKKFKPEIATRPKVRDQTGRMNYYWTLVEPGDTITFEATGNLVIPKYAFAMKRGSGSGIIISDATVHDCNTTCQTPKGAINTSLPFQNIHPVTIGECPKYVKSTKLRMATGLRNVPSIQSRGLFGAIAGFIEGGWTGMIDGWYGYHHQNEQGSGYAADRKSTQNAIDGITNKVNSVIEKMNTQFSAVGKEFNHLEKRIENLNKKVDDGFLDVWTYNAELLVLLENERTLDYHDSNVKNLYEKVRSQLKNNAKEIGNGCFEFYHKCDDACMESVKNGTYDYPKYSEEAKLNREKIDGVKLES

SEQ ID NO: 29 - protein, 508 aa, Artificial Sequence
  Description of Artificial Sequence: Synthetic polypeptide
ADTICIGYHANNSTDTVDTVLEKNVTVTHSVNLLEDTHNGKLCKLGGMAPLHLGRCNIAGWLLGNPECELISTVSSWSYIVETSNSDNGTCYPGDFTNYEELREQLSSVSSFEKFEMFPKISSWPNHETNRGVTAACPYAGANSFYRNLIWLVKKGNSYPKLSKSYVNNKGKEVLVLWGIHHPPTSADQQSLYQNVDTYVFVGSSTYNRKFKPEIAVRPKVRDQTGRMNYYWTLIKPGDTITFEATGNLVAPRYAFAMSRGSGSGIITSDMPVHNCTTKCQTPKGALNTSLPFQNVHPVTIGECPKYVKSTKLRMATGLRNIPSIQSRGLFGAIAGFIEGGWTGMIDGWYGYHHQNEQGSGYAADQKSTQNAIDGITNKVNSVIEKMNTQFTAVGKEFNHLERRMENLNKKVDDGFLDVWTYNAELLILLENERTLDLHDSNVKNLYEKVRAQLRNNAKEIGNGCFEFYHKCDDACMESVKNGTYDYPKYSEESRLNREEIDGVKLES

SEQ ID NO: 30 - protein, 507 aa, Artificial Sequence
  Description of Artificial Sequence: Synthetic polypeptide
ADTICIGYHANNSTDTVDTVLEKNVTVTHSVNLLENSHNGKLCLLKGIAPLQLGNCSVAGWILGNPECELLISKESWSYIVEKPNPENGTCYPGHFADYEELREQLSSVSSFERFEIFPKESSWPNHTVTGVSASCSHNGESSFYRNLLWLTGKNGLYPNLSKSYANNKEKEVLVLWGVHHPPNIGDQKALYHTENAYVSVVSSHYSRKFTPEIAKRPKVRDQEGRINYYWTLLEPGDTIIFEANGNLIAPRYAFALSRGFGSGIINSNAPMDKCDAKCQTPQGAINSSLPFQNVHPVTIGECPKYVRSAKLRMVTGLRNIPSIQSRGLFGAIAGFIEGGWTGMVDGWYGYHHQNEQGSGYAADQKSTQNAINGITNKVNSVIEKMNTQFTAVGKEFNKLERRMENLNKKVDDGFIDIWTYNAELLVLLENERTLDFHDSNVKNLYEKVKSQLKNNAKEIGNGCFEFYHKCNDECMESVKNGTYDYPKYSEESKLNREKIDGVKLES

SEQ ID NO: 31 - protein, 508 aa, Artificial Sequence
  Description of Artificial Sequence: Synthetic polypeptide
ADTICVGYHANNSTDTIDTILEKNVTVTHSVNLLENSHNGKLCSLNGIAPLQLGSCNVAGWILGNPECDLLLTVNSWSYIVETSNSENGTCYPGEFADYEELREQLSSVSSFERFEIFPKTTSWPNHDTTKGTTAACSHSGTNSFYRNLLWIVKKGNSYPKLNSSYTNNKGKEVLIIWGVHHPPTNNDQQSLYQNADTYVSVGSSKYYQRFTPEIAARPKVRGQAGRMNYYWTLLDQGDTITFEATGNLIAPWYAFALNKNSGSGIMISDAQVHNCTTKCQTPHGAMNSNLPFQNVHPVTIGECPKYVKSTQLRMATGLRNVPSIQSRGLFGAIAGFIEGGWTGMIDGWYGYHHQNGQGSGYAADQKSTQLAIDGISNKVNSVIEKMNIQFTSVGKEFNNLEKRIENLNKKVDDGFLDVWTYNAEILILLENERTLDFHDFNVKNLYEKVKSQLRNNAKEVGNGCFEFYHKCDNECMESVRNGTYNYSKYSEESKLNREEIDGVKLES

SEQ ID NO: 32 - protein, 508 aa, Artificial Sequence
  Description of Artificial Sequence: Synthetic polypeptide
ADTLCVGYHANNSTDTVDTILEKNVTVTHSVNLLEDRHNGKLCKLGGIAPLHLGKCNIAGWLLGNPECDSLLTVRSWSYIVETSNSDNGTCYPGEFINYEELKEQLSSVSSFERFEIFPKASSWPNHETNKGVTAACPYAGSNSFYRNLIWLVKKGNSYPKLNKSYINNKGKEVLVLWGIHHPPTNNDQQSLYQNEDAYVFIGSSKYNKKFKPEIATRPKVRGQAGRMDYYWLLMEPGETITFEATGNLVVPRYAFAMNRDARSGIIISDVSVHDCNTTCQTPKGALNTSLPFQNIHPVTIGECPKYVKSTKLRMATGLRNIPSIQSRGLFGAIAGFIEGGWTGMIDGWYGYHHQNEQGSGYAADQKSTQNAIDGITNKINSVIEKMNTQFAAVGKEFNHLEKRLENLNKKVDDGFLDVWTYNAELLVLLENERTLDFHDSNVKNLYEKVRSQLRNNAKEIGNGCFEFYHRCDDACMESVKNGTYDYPVYSEESRLNREEIDGVKLDS

SEQ ID NO: 33 - protein, 508 aa, Artificial Sequence
  Description of Artificial Sequence: Synthetic polypeptide
ADTLCIGYHANNSTDTVDTVLEKNVTVTHSVNLLEDKHNGKLCKLRGVAPLHLGKCNIAGWILGNPECESLSTASSWSYIVETPSSDNGTCYPGDFIDYEELREQLSSVSSFERFEIFPKTSSWPNHDSNKGVTAACPHAGAKSFYKNLIWLVKKGNSYPKLSKSYINDKGKEVLVLWGIHHPSTSADQQSLYQNADAYVFVGSSRYSKKFKPEIAIRPKVRDREGRMNYYWTLVEPGDKITFEATGNLVVPRYAFAMERNAGSGIIISDTPVHDCNTTCQTPKGAINTSLPFQNIHPITIGKCPKYVKSTKLRLATGLRNIPSIQSRGLFGAIAGFIEGGWTGMVDGWYGYHHQNEQGSGYAADLKSTQNAIDEITNKVNSVIEKMNTQFTAVGKEFNHLEKRIENLNKKVDDGFLDIWTYNAELLVLLENERTLDYHDSNVKNLYEKVRSQLKNNAKEIGNGCFEFYHKCDNTCMESVKNGTYDYPKYSEEAKLNREEIDGVKLES

SEQ ID NO: 34 - protein, 507 aa, Artificial Sequence
  Description of Artificial Sequence: Synthetic polypeptide
ADTICIGYHANNSTDTVDTVLEKNVTVTHSVNLLEDNHNGKLCSLKGIVPLQLGNCSVAGWILGNPECELLISKKSWSYIVETPNPENGACYPGDFADYEELREQLSSVSSFERFEIFPKESSWPNHNVNGVSAACSHNGERSFYRNLLWLTGKNGLYPNLTNSYVNSKEKEVLILWGVHHPSNIRDQRTLYQTENAYVSVMSSHYSRRFTPEITKRPKVRDQEGRINYYWTLLEPGDTIIFEASGNLIAPWYGFELSRGFGSGIITSSAPTDECDAKCQTPQGAINSSLPFQNVHPVTIGECPKYVRSAKLRMVTGLRNIPSIQSRGLFGAIAGFIEGGWTGMVDGWYGYHHQNEQGSGYAADQESTQNAINGITNKVNSVIEKMNTQFTAVGKEFNKLERRMENLNKKVDDGFLDIWTYNAELLVLLENERTLDFHDSNVRSLYEKVRVQLKNNAKEIGNGCFEFYHKCNNECMESVRNGTYDYPKYSEESKLNREKIDGVKLDS

SEQ ID NO: 35 - protein, 508 aa, Artificial Sequence
  Description of Artificial Sequence: Synthetic polypeptide
ADTLCIGYHANNSTDTVDTVLEKNVTVTHSVNLLENRHNGKLCKLRGVAPLHLGKCNIAGWLLGNPECESLSTASSWSYIVETSNSDNGTCYPGDFINYEELREQLSSVSSFERFEIFPKTSSWPNHDTNRGVTAACPHDGTNSFYRNLIWLVKKGNSYPKINKSYINNKEKEILVLWAIHHPSTSADQQSLYQNADAYVFVGSSRYSRKFEPEVATRPKVRDQAGRMNYYWTLVEPGDKITFEATGNLVVPRYAFALKRNSGSGIIISDTSVHDCDTNCQTPNGAINTSLPFQNIHPVTIGECPKYVKSTKLRMATGLRNIPSIQSRGLFGAIAGFIEGGWTGMIDGWYGYHHQNEQGSGYAADLKSTQNAIDGITNKVNSVIEKMNTQFTAVGKEFSHLERRIENLNKKVDDGFLDIWTYNAELLVLLENERTLDYHDSNVKNLYEKVRSQLKNNAKEIGNGCFEFYHKCDDMCMESVKNGTYDYPKYSEEAKLNREEIDGVKLES

SEQ ID NO: 36 - protein, 508 aa, Artificial Sequence
  Description of Artificial Sequence: Synthetic polypeptide
ADTLCVGYHANNSTDTVDTVLEKNVTVTHSVNLLEDRHNGKLCKLRGVPPLHLGKCNIAGWLLGNPECEPLLTTSSWSYIVETSISENGTCYPGDFIDYEELREQLSSVSSFERFEIFPKTSSWPNHDSNSGVTAACPHAGAKSFYRNLIWLVKKGNSYPKLSKSYINNKGKEVLVLWGIHHPPTSADQQSLYQNVDTYVFVGSSRYSKKFKPEIATRPKVRDQAGRMNYYWTLVEPGDKITFEATGNLIVPRYAFAMRRNSGSGIIISDTPVHDCNATCQTPNGAINTSLPFQNIHPVTIGECPKYIKSTKLRMATGLRNVPSIQSRGLFGAIAGFIEGGWTGMIDGWYGYHHRNEQGSGYAADLKSTQNAIDGITNKVNSVIEKMNTQFTAVGKEFNHLEKRIENLNKKVDDGFLDIWTYNAELLVLLENERTLDYHDSNVKNLYEKVKSQLKNNAKEIGNGCFEFYHKCDNTCMESVKNGTYDYPKYSEEAKLNREEIDGVRLES

SEQ ID NO: 37 - protein, 507 aa, Artificial Sequence
  Description of Artificial Sequence: Synthetic polypeptide
ADTICIGYHANNSTDTVDTVLEKNVTVTHSVNLLEDSHNGKLCLLKGIAPLQLGNCSVAGWILGNPECESLISKKSWSYIVETPNPENGACYPGEFADYEELREQLSSVSSFERFEIFPKESSWPNHTATGESASCSHNGKKSFYRNLIWLTVKNGLYPNLSKSYENDKEKEVLILWGVHHPPNIENQRTLYHTENAYVSVVSSHYSGRFTPEITKRPKVRDQEGRINYYWTLLEPGDTIIFEANGNLIAPWYAFALSRGLGSGIITSNAPMDECDSKCQTPQGAINSSLPFQNVHPVTIGECPKYVRSAKLRMVTGLRNIPSIQSRGLFGAIAGFIEGGWTGMVDGWYGYHHQNEQGSGYAADQESTQNAINGITNKVNSVIEKMNTQFTAVGKEFNKLERRMENLNKKVDDGFLDIWTYNAELLVLLENERTLDFHDSNVKSLYEKVKSQLKNNAKEIGNGCFEFYHKCNNECMESVKNGTYDYPKYYEESKLNREKIDGVKLDS

SEQ ID NO: 38 - protein, 508 aa, Artificial Sequence
  Description of Artificial Sequence: Synthetic polypeptide
ADTICIGYHANNSTDTVDTVLEKNVTVTHSINLLEDSHNGKLCKLKGIAPLQLGDCSIAGWILGNPNCESLFSKKSWSYIAEIPNPENGICYPGYFSDYEELREQLSSISSFERFEIFPKESSWPKHSVNKGVTASCSHKGKSSFYRNLLWLTEKNGSYPNLSKSYVNSREKEVLVLWGVHHPSNIEDQRAIYRKENAYISVVSSLYNRRFTPEIARRPKVRDQEGRINYYWTILEPRDTIIFEATGNLIAPWYAFSLSRGFKSGIIVSNSSIDNCDTKCQTPQGAINSSLPFQNVHPVTIGECPKYVRSTKLRMATGLRNIQSIQSRGLFGAIAGFIEGGWTGMIDGWYGYHHQNEQGSGYAADLKSTQNAIDGITNKVNSVIDKMNTQFASVGKEFNKLEKRMENLNKKVDDGFLDIWTYNAELLVLLENERTLDFHDSNVKSLYNKVKGQLKSNAKEIGNGCFEFYHKCDNECMESVKNGTYDYKEYSEESKLNREKIDGVELKS

SEQ ID NO: 39 - protein, 508 aa, Artificial Sequence
  Description of Artificial Sequence: Synthetic polypeptide
ADTICIGYHANNSTDTVDTVLEKNVTVTHSVNLLEDSHNGKLCRLNGISPLQLGTCSIAGWVLGNPKCESLFSRRSWSYIAEVPNPENGICYPGHFSDYEELREQLSSVSSFERFEIFPKESSWPGHNLTKGVTASCSHNGKSSFYRNLLWLTGEKGLYPKVNKSYVNNKKKEVLVLWGVHHPSNIEDQRAIYHEENAYVSVVSSHYSRRFTPEIARRPKIRNQEGRINYYWTLLEPDDKIIFEANGNLIAPRYAFALSRGFGSGIIVSNTSIDECNTKCQTPQGAINSSLPFQNVHPVTIGECPKYVRSTKLRMVTGLRNIPSIQSRGLFGAIAGFIEGGWTGMIDGWYGYHHRNEQGSGYAADQESTQNAINGITNKVNSVIEKMNTQFTAVGKEFNKLEKRMENLNKKVDDGFLDIWTYNAELLVLLENERTLDFHDSNVKNLYEKVKSQLKNNAKEIGNGCFEFYHKCDDDCMESVKNGTYDYPRYSEESSLNRGKIDGVKLES

SEQ ID NO: 40 - protein, 508 aa, Artificial Sequence
  Description of Artificial Sequence: Synthetic polypeptide
ADTICIGYHANNSTDTVDTILEKNVTVTHSVNLLESSHNGKLCRMKGMAPLQLGKCSIAGWILGNPECESSFSRKSWSYIAEAPNPENGICYPGYFSDYEELREQLSSVSSVERFEIFPKESSWPKHNVTRGKTVSCPHNGKSSFYKNLLWLTEKDGSYPNVSKPYVNNKEKEVLVIWGVHNPSNIEDQRAIYRKETAYVSVVSSHYNRRFTPEIEKRPKIKNQEGRINYYWTLLEPGETIIFEANGNFIAPWYAFALSRGFRSGIIVSNASMDECDTECQTPQGAINNSLPFQNVHPVAIGECPKYIKSTRLRMVTGLRNIPSIQSRGLFGAIAGFIEGGWTGMIDGWYGYHHRNEQGSGFAADQESTQNAINGITNKVNSIIGKMNTQFTAAGKEFNRLEKRMENLNKKVDDGLLDIWTYNAELLVLLENERTLDFHDSNVKNLYEKVKSQLKNNAKEIGNGCFEFYHKCNNECMESVKNGTYDYPKYSEESSLNRRKIDGVKLES

SEQ ID NO: 41 - protein, 508 aa, Artificial Sequence
  Description of Artificial Sequence: Synthetic polypeptide
ADTICVGYHANNSTDTVDTILEKNVTVTHSINLLESSHNGKLCSLNGIAPLQLGNCNIAGWILGNPECDLSFTANSWSYIIETSNSENGACYPGKFTDYEELREKLSSVSSFERFEIFPKATSWPNHETNKGTTAACSHSGVKSFYRNLLWIVKKGNSYTKVNKSYTNNKGKEVLVIWGVHHPPTNNVQQTLYQNASTYVSVGTSKYYRRFTPEIVARPKVRDQAGRINYYWTLLDQGDTITFEATGNLIAPWYAFALNKGSVSGIIISDANVHNCTTKCQTPHGALKSRLPFQNVHPITIGECPKYVKSTQLRMATGLRNIPSIQSRGLFGAIAGFIEGGWTGMIDGWYGYHHQNEQGSGYAADQKSTQSAIDGISNKVNSIIEKMNVQFTSVGKEFNNLEKRLENLNKKVDDGFLDVWTYNAELLILLENERTLDFHDFNVKNLYEKVKSQLRDNAKEVGNGCFEFYHKCDNECMESIKNGTYDYPKYSEESKLNREEIYGVKLES

SEQ ID NO: 42 - protein, 508 aa, Artificial Sequence
  Description of Artificial Sequence: Synthetic polypeptide
ADTICVGYHANNSTDTVDTILEKNVTVTHSVNLLENSHNGKLCSLNGKAPLQLENCNVAGWILGNPECDFLLTAYSWSYIIETSNSKNGTCYPGEFNNYEELREQLSTVSSLERFEIFPKATSWPNHDTTKGTTVACSHSGANSFYRNLLWIVKKENSYPKLSKSYTNNKGKEVLVIWGVHHPPTDSDQQTLYQNNNTYVSVESSKYYQRFTPEIVARPKVRKQAGRMNYYWILLDQGDTITFEATGNLIAPWYAFALDKGSSSGIMMSDAHVQNCTTKCQTPHGALKSNLPFQNVHPITIGECPKYVKSTQLRMATGLRNIPSIQSRGLFGAIAGFIEGGWTGMIDGWYGYHHQNEQGSGYAADKKSTQIAIDGISNKVNSIIEKMNIQFTSVGKEFNNLEKRIENLNKKVDDGFLDVWTYNAELLILLENERTLDFHDFNVRNLYEKVKSQLRNNAREIGNGCFEFYHKCDNECMESIRNGTYNYPRYSEESKLNREKIDGVKLES

SEQ ID NO: 43 - protein, 508 aa, Artificial Sequence
  Description of Artificial Sequence: Synthetic polypeptide
ADTLCIGYHANNSTDTVDTVLEKNVTVTHSVNLLEDKHNGKLCKLRGVAPLHLGKCNIAGWILGNPECESLSTASSWSYIVETSNSDNGTCYPGDFINYEELREQLSSVSSFERFEIFPKTSSWPNHDSNKGVTAACPHAGAKSFYKNLIWLVKKGNSYPKLNQSYINDKGKEVLVLWGIHHPSTTADQQSLYQNADAYVFVGTSRYSKKFKPEIATRPKVRDQEGRMNYYWTLVEPGDKITFEATGNLVVPRYAFTMERNAGSGIIISDTPVHDCNTTCQTPEGAINTSLPFQNIHPITIGKCPKYVKSTKLRLATGLRNVPSIQSRGLFGAIAGFIEGGWTGMVDGWYGYHHQNEQGSGYAADLKSTQNAIDKITNKVNSVIEKMNTQFTAVGKEFNHLEKRIENLNKKVDDGFLDIWTYNAELLVLLENERTLDYHDSNVKNLYEKVRNQLKNNAKEIGNGCFEFYHKCDNTCMESVKNGTYDYPKYSEEAKLNREKIDGVKLES

SEQ ID NO: 44 - protein, 499 aa, Artificial Sequence
  Description of Artificial Sequence: Synthetic polypeptide
TATLCLGHHAVPNGTLVKTITDDQIEVTNATELVQSSSTGKICNNPHRILDGIDCTLIDALLGDPHCDVFQNETWDLFVERSKAFSNCYPYDVPDYASLRSLVASSGTLEFITEGTWTGVTQNGGSNACKRGPGSGFFSRLNWLTKSGSTYPVLNVTMPNNDNFDKLYIWGVHHPSTNQEQTSLYVQASGRVTVSTRRSQQTIIPNIGSRPWVRGLSSRISIYWTIVKPGDVLVINSNGNLIAPRGYFKMRTGKSSIMRSDAPIDTCISECITPNGSIPNDKPFQNVNKITYGACPKYVKQNTLKLATGMRNVPEKQTRGLFGAIAGFIENGWEGMIDGWYGFRHQNSEGTGQAADLKSTQAAIDQINGKLNRVIEKTNEKFHQIEKEFSEVEGRIQDLEKYVEDTKIDLWSYNAELLVALENQHTIDLTDSEMNKLFEKTRRQLRENAEDMGNGCFKIYHKCDNACIESIRNGTYDHDVYRDEALNNRFQIKGVELKS

SEQ ID NO: 45 - protein, 499 aa, Artificial Sequence
  Description of Artificial Sequence: Synthetic polypeptide
TATLCLGHHAVPNGTLVKTITNDQIEVTNATELVQSSSTGRICDSPHRILDGKNCTLIDALLGDPHCDGFQNEKWDLFVERSKAFSNCYPYDVPDYASLRSLVASSGTLEFINEGNWTGVTQSGGSYACKRGSVNSFFSRLNWLYESEYKYPALNVTMPNNGKFDKLYIWGVHHPSTDKEQTNLYVRASGRVTVSTKRSQQTVIPNIGSRPWVRGLSSRISIYWTIVKPGDILLINSTGNLIAPRGYFKIRTGKSSIMRSDAPIGTCSSECITPNGSIPNDKPFQNVNKITYGACPRYVKQNTLKLATGMRNVPEKQTRGIFGAIAGFIENGWEGMVDGWYGFRHQNSEGTGQAADLKSTQAAIDQINGKLNRLIEKTNEKFHQIEKEFSEVEGRIQDLEKYVEDTKIDLWSYNAELLVALENQHTIDLTDSEMNKLFEKTRKQLRENAEDMGNGCFKIYHKCDNACIGSIRNGTYDHDVYRDEALNNRFQIKGVELKS

SEQ ID NO: 46 - protein, 500 aa, Artificial Sequence
  Description of Artificial Sequence: Synthetic polypeptide
IATLCLGHHAVPNGTLVKTITSDQIEVTNATELVQSFSTGEICNNPHRILDGMDCTLVDALLGDPHCDGFQNGTWDLFVERSKAFSNCYPYDVPDYASLRSLIASSGTLEFTNEGFNWAGVTQNGGSSACRRGSDSSFFSRLNWLYKLGNTYPVLNVTMPNNDNFDKLYIWGIHHPSTDQEQTRLYARESGRVTVSTKRSQQTVTSNVGPRPWVRGLSSRISIYWTIVKPGDILLINSNGNLIAPRGYFKMRAGKSSIMRSDAPISTCISECITPNGNVPNDKPFQNVNKITYGACPKYIRQKTLKLATGMRNVPEKQTRGIFGAKAGFIENGWEGMVDGWYGFRHQNSEGTGQAADLKSTQTAIDQINGKLNRVIEKTNEKFHQIEKEFSEVEGRIQDLEKYVEDTKIDLWSYNAELLVALENQHTIDLTDSEMNKLFEKTRRQLRENAEDIGNGCFKIYHRCDNACIGSIRNGTYNHNVYRDEALNNRFQIRGVELKS

SEQ ID NO: 47 - protein, 499 aa, Artificial Sequence
  Description of Artificial Sequence: Synthetic polypeptide
TATLCLGHHAVPNGTLVKTITNDQIEVTNATELVQSSSTGRICDSPHRILDGKNCTLIDALLGDPHCDGFQNKEWDLFVERSKAYSNCYPYDVPDYASLRSLVASSGTLEFTNEGNWTGVAQDGTSYACKRGSVKSFFSRLNWLHKLEYKYPALNVTMPNNDKFDKLYIWGVHHPSTDSVQTSLYVQASGRVTVSTKRSQQTVIPNIGSRPWVRGISSRISIYWTIVKPGDILLINSTGNLIAPRGYFKIRSGKSSIMRSDAPIGNCNSECITPNGSIPNDKPFQNVNRITYGACPRYVKQNTLKLATGMRNVPEKQTRGIFGAIAGFIENGWEGMVDGWYGFRHQNSEGTGQAADLKSTQAAINQINGKLNRLIEKTNEKFHQIEKEFSEVEGRIQDLEKYVEDTKIDLWSYNAELLVALENQHTIDLTDSEMNKLFERTRKQLRENAEDMGNGCFKIYHKCDNACIGSIRNGTYDHDVYRDEALNNRFQIKGVELKS

SEQ ID NO: 48 - protein, 499 aa, Artificial Sequence
  Description of Artificial Sequence: Synthetic polypeptide
TATLCLGHHAVPNGTLVKTITNDQIEVTNATELVQSSSTGRICDSPHRILDGENCTLIDALLGDPHCDGFQNKEWDLFVERSKAYSNCYPYDVPDYASLRSLVASSGTLEFNNESNWTGVAQNGTSYACKRSSIKSFFSRLNWLHQLKYKYPALNVTMPNNDKFDKLYIWGVHHPSTDSDQTSIYAQASGRVTVSTKRSQQTVIPNIGSRPWVRGISSRISIHWTIVKPGDILLINSTGNLIAPRGYFKIRSGKSSIMRSDAPIGKCNSECITPNGSIPNDKPFQNVNRITYGACPRYVKQNTLKLATGMRNVPEKQTRGIFGAIAGFIENGWEGMVDGWYGFRHQNSEGTGQAADLKSTQAAINQINGKLNRLIEKTNEKFHQIEKEFSEVEGRIQDLEKYVEDTKIDLWSYNAELLVALENQHTIDLTDSEMNKLFERTRKQLRENAEDMGNGCFKIYHKCDNACIGSIRNGTYDHDVYRDEALNNRFQIKGVELKS

SEQ ID NO: 49 - protein, 500 aa, Artificial Sequence
  Description of Artificial Sequence: Synthetic polypeptide
IAMLCLGHHAVPNGTLVKTITNDQVEVTNATELVQSSSTGKICNHPHRILDGMDCTLIDSLLGDPHCDSFQNETWDLFVERSRAFSNCYPYDVPDYASLRSLVASSGTLEFINEDFNWAEVTQNGGSSACKRGSDSSFFSRLNWLYKSGNTYPTLNVTIPNNGNFDKLYIWGIHHPSTTKEQTRLYVQESGKVTVSTKRSQQTVIPNVGPRPWVRGLSSRISIYWTIVKPGDLLLISSTGNLIAPRGYFRLRAGKSSIIRSEAPIGTCISECITPNGSIPNDKPFQNVNKITYGACPKYVKQNTLKLATGMRNVPEKQTRGIFGAKAGFIENGWEGMIDGWYGFRHQNSEGTGQAADLKSTQAVIDQINGKLNRIIEKTNEKFHQIEKEFSEVEGRVQDLEKYVEDTKIDLWSYNAELLIALENQHTIDLADSEMNKLFEKTRRLLRENAEDIGNGCLKIYHRCDNACIGSIRNGTYNHDVYRDEALNNRFQIKGIELKS

SEQ ID NO: 50 - protein, 500 aa, Artificial Sequence
  Description of Artificial Sequence: Synthetic polypeptide
TATLCLGHHAVPNGTLVKTITDDQIEVTNATELVQNFSMGKICNNPHRILDGANCSLIDALLGDPHCDDLQNEKWDLFIERSKAFSNCYPYDVPEYTSLRSLIASSGTLEFTNEGFNWTGVTQNGGSSACKRGPNNSFFSRLNWLYKSGNTYPILNVTMQNSDDFDKLYIWGVHHPSTDREQTNLYVQASGKVTVSTKRSQQTIIPNIGSRPWIRGLSSRISIYWTIVKPGDILMINSNGNLIAPRGYFKVYTGRSSIMKSDAPLDTCNSECITPNGSIPNDKPFQNVNKITYGACPKYIKQNTLKLATGMRNIPEKQTRGIFGAIAGFIENGWEGMVNGWYGFRHQNSEGTGQAADLKSTQAAINQINGKLNRIIEKTNEKFHQIEKEFSEVEGRIQDLEKYVEDTKIDLWSYNAELLVALENQHTIDLTDSEMNKLFEKTRKQLRENAEDMGNGCFKIYHKCDNSCMESIRNGTYDHNEYRNEALSNRFQIKSVELKS

SEQ ID NO: 51 - protein, 499 aa, Artificial Sequence
  Description of Artificial Sequence: Synthetic polypeptide
TATLCLGHHAVPNGTIVKTITNDQIEVTNATELVQSSSTGGICDSPHQILDGENCTLIDALLGDPQCDGFQNKKWDLFVERSKAYSNCYPYDVPDYASLRSLVASSGTLEFNNESNWTGVTQNGTSSACKRRSNKSFFSRLNWLTHLKYKYPALNVTMPNNEKFDKLYIWGVLHPGTDSDQIRLYAQASGRITVSTKRSQQTVIPNIGSRPRVRDVSSRISIYWTIVKPGDILLINSTGNLIAPRGYFKIRSGKSSIMRSDAPIGKCNSECITPNGSIPNDKPFQNVNRITYGACPRYIKQNTLKLATGMRNVPEKQTRGIFGAIAGFIENGWEGMVDGWYGFRHQNSEGTGQAADLKSTQAAINQINGKLNRLIGKTNEKFHQIEKEFSEVEGRIQDLEKYVEDTKIDLWSYNAELLVALENQYTIDLTDSEMNKLFERTKKQLRENAEDMGNGCFKIYHKCDNACIGSIRNGTYDHDVYRDEALNNRFQIKGVELKS

SEQ ID NO: 52 - protein, 499 aa, Artificial Sequence
  Description of Artificial Sequence: Synthetic polypeptide
TATLCLGHHAVPNGTIVKTITNDQIEVTNATELVQSSSTGGICDSPHQILDGENCTLIDALLGDPQCDGFQNKKWDLFVERSKAYSNCYPYDVPDYASLRSLVASSGTLEFNNESNWAGVTQNGTSSACKRRSNKSFFSRLNWLTHLKYKYPALNVTMPNNEKFDKLYIWGVHHPGTDSDQISLYAQASGRITVSTKRSQQTVIPNIGSRPRVRDVSSRISIYWTIVKPGDILLINSTGNLIAPRGYFKIRSGKSSIMRSDAPIGKCNSECITPNGSIPNDKPFQNVNRITYGACPRYVKQNTLKLATGMRNVPEKQTRGIFGAIAGFIENGWEGMVDGWYGFRHQNSEGTGQAADLKSTQAAINQINGKLNRLIGKTNEKFHQIEKEFSEVEGRIQDLEKYVEDTKIDLWSYNAELLVALENQHTIDLTDSEMNKLFERTKKQLRENAEDMGNGCFKIYHKCDNACIESIRNGTYDHDVYRDEALNNRFQIKGVELKS

SEQ ID NO: 53 - protein, 499 aa, Artificial Sequence
  Description of Artificial Sequence: Synthetic polypeptide
TATLCLGHHAVPNGTIVKTITNDQIEVTNATELVQSSSTGGICDSPHQILDGENCTLIDALLGDPQCDGFQNKKWDLFVERSKAYSNCYPYDVPDYASLRSLVASSGTLEFNNESNWTGVTQNGTSSSCKRRSNNSFFSRLNWLTHLKFKYPALNVTMPNNEKFDKLYIWGVHHPGTNNDQISLYTQASGRITVSTKRSQQTVIPNIGSRPRVRDIPSRISIYWTIVKPGDILLINSTGNLIAPRGYFKIRSGKSSIMRSDAPIGKCNSECITPNGSIPNDKPFQNVNRITYGACPRYVKQNTLKLATGMRNVPEKQTRGIFGAIAGFIENGWEGMVDGWYGFRHQNSEGIGQAADLKSTQAAINQINGKLNRLIGKTNEKFHQIEKEFSEVEGRIQDLEKYVEDTKIDLWSYNAELLVALENQHTIDLTDSEMNKLFERTKKQLRENAEDMGNGCFKIYHKCDNACIGSIRNGTYDHDVYRDEALNNRFQIKGVELKS

SEQ ID NO: 54 - protein, 500 aa, Artificial Sequence
  Description of Artificial Sequence: Synthetic polypeptide
TATLCLGHHAVPNGTLVQTITDDQVEVTNATELVQSSSVGRICNSPHRILDGGNCTLIDALLGDPHCDAFQNEKWDLFVERSKAFSNCYPYDMQDYVSLRSLVASSGTLEFTNEGFNWTGVTQSGGSYACKRGSGNSFFSRLNWLYQSENKYPALNVTMPNNGNFDKLYIWGVHHPSTDREQTNLYVRGSGRVTVSTKRSQQTVIPNIGPGPWVRGLSSRMSIYWTIVKPGDTLLITSNGNLIAPRGYFKIHAGKSSIMRSDAPIGTCSSECITPNGSIPNDKPFQNVNKITYGACPKYVKQNTLKLATGMRNIPEKQNRGIFGAIAGFIENGWEGMVDGWYGFRHQNSEGTGQAADLKSTQAAIDQINGKLNRVIEKTNEKFHQIEKEFSEVEGRIQDLEKYVEDTKIDLWSYNAELLVALENQHTVDLTDSEMNKLFEKTRRQLRENAEDMGNGCFKIYHKCDNTCIGSIRNGTYDHDIYRDEALNNRFQIKDVVLKS

SEQ ID NO: 55 - protein, 500 aa, Artificial Sequence
  Description of Artificial Sequence: Synthetic polypeptide
  MOD_RES (232)..(232): Any amino acid
TATLCLGHHAVPNGTIVKTITNDQIEVTNATELVQSSSTGEICDSPHQILDGKNCTLIDALLGDPQCDGFQNKKWDLFVERSKAYSNCYPYDVPDYASLRSLVASSGTLEFNNESFNWTGVTQNGTSSACIRRSKNSFFSRLNWLTHLNFKYPALNVTMPNNEQFDKLYIWGVHHPGTDKDQIFLYAQASGRITVSTKRSQQTAIPNIGYRPRVRNIPSRISIYWTIVKPGXILLINSTGNLIAPRGYFKIRSGKSSIMRSDAPIGKCNSECITPNGSIPNDKPFQNVNRITYGACPRYVKQNTLKLATGMRNVPEKQTRGIFGAIAGFIENGWEGMVDGWYGFRHQNSEGRGQAADLKSTQAAIDQINGKLNRLIGKTNEKFHQIEKEFSEVEGRIQDLEKYVEDTKIDLWSYNAELLVALENQHTIDLTDSEMNKLFEKTKKQLRENAEDMGNGCFKIYHKCDNACIGSIRNGTYDHDVYRDEALNNRFQIKGVELKS

SEQ ID NO: 56 - protein, 499 aa, Artificial Sequence
  Description of Artificial Sequence: Synthetic polypeptide
TATLCLGHHAVPNGTIVKTITNDQIEVTNATELVQSSSTGEICDSPHQILDGENCTLIDALLGDPQCDGFQNKKWDLFVERSKAYSNCYPYDVPDYASLRSLVASSGTLEFNNESNWTGVTQNGTSSACIRRSNNSFFSRLNWLTHLKFKYPALNVTMPNNEKFDKLYIWGVHHPGTDNDQIFPYAQASGRITVSTKRSQQTVIPNIGSRPRVRNIPSRISIYWTIVKPGDILLINSTGNLIAPRGYFKIRSGKSSIMRSDAPIGKCNSECITPNGSIPNDKPFQNVNRITYGACPRYVKQNTLKLATGMRNVPEKQTRGIFGAIAGFIENGWEGMVDGWYGFRHQNSEGIGQAADLKSTQAAIDQINGKLNRLIGKTNEKFHQIEKEFSEVEGRIQDLEKYVEDTKIDLWSYNAELLVALENQHTIDLTDSEMNKLFEKTKKQLRENAEDMGNGCFKIYHKCDNACIGSIRNGTYDHDVYRDEALNNRFQIKGVELKS

SEQ ID NO: 57 - protein, 499 aa, Artificial Sequence
  Description of Artificial Sequence: Synthetic polypeptide
TATLCLGHHAVPNGTIVKTITNDQIEVTNATELVQSSSTGEICDSPHQILDGENCTLIDALLGDPQCDGFQNKKWDLFVERSKAYSNCYPYDVPDYASLRSLVASSGTLEFNNESFNWTGVTQNGTSSACIRRSNNSFFSRLNWLTHFKFKYPALNVTMPNNEQFDKLYIWGVHHPGTDNDQIFLYAQASGRITVSTKRSQQTVIPNIGSRPRVRIPSRISIYWTIVKPGDILLINSTGNLIAPRGYFKIRSGKSSIMKSDAPIGKCNSECITPNGSIPNDKPFQNVNRITYGACPRYVKQNTLKLATGMRNVPEKQTRGIFGAIAGFIENGWEGMVDGWYGFRHQNSEGRGQAADLKSTQAAIDQINGKLNRLIGKTNEKFHQIEKEFSEVEGRIQDLEKYVEDTKIDLWSYNAELLVALENQHTIDLTDSEMNKLFEKTKKQLRENAEDMGNGCFKIYHKCDNACIGSIRNGTYDHDVYRDEALNNRFQIKGVELKS

SEQ ID NO: 58 - protein, 500 aa, Artificial Sequence
  Description of Artificial Sequence: Synthetic polypeptide
TATLCLGHHAVPNGTLVKTITGEQIEVTNATELVQSLSMGKICKNPHRILDGANCTLMDALLGDPHCDGFQNEKWDLFIERSKAFSNCYPYDVPEYTSLRSIIASSGTLEFFSENFNWTGVTQNGGSNSCKRGPNSSFFSRLNWLYKSGNNYPILNVTMPNSEGFDKLYIWGVHHPSTENEQTNLYAQAPGKITVSTRSSQQTVIPNIGPRPWIRGLSSRISIYWTIVKPGDILMINSNGNLIAPRGHFKVHTGRSSIMRSDAPIDTCSSECITPNGSIPNDKPFQNVNKITYGVCPKYVKQSTLKLATGMRNIPERQTRGIFGAIAGFIENGWEGMVDGWYGFRHQNSEGTGQAADLKSTQAAINQINGKLNRVIEKTNEKFHQIEKEFSEVEGRIQDLEKYVEDTKIDLWSYNAELLVALENQHTIDLTDSEMNKLFEKTRKQLRENAEDMGNGCLKIYHKCDNSCMRSIRNGTYDHNEYRDEALNNRFQIKSVELKL

SEQ ID NO: 59 - protein, 499 aa, Artificial Sequence
  Description of Artificial Sequence: Synthetic polypeptide
TATLCLGHHAVPNGTIVKTITNDQIEVTNATELVQSSSTGEICNSPHQILDGENCTLIDALLGDPQCDGFQNKKWDLFVERSKAHSNCYPYDVPDYASLRSLVASSGTLEFNNESNWTGVTQNGTSSACIRRSNNSFFSRLNWLTHLNFKYPALNVTMPNNEQFDKLYIWGVHHPGTDKDQIFLYAQASGRITVSTKRSQQAVIPNIGSRPRVRDIPSRVSIYWTIVKPGDILLINSTGNLIAPRGYFKIRSGKSSIMRSDAPIGKCNSSCITPNGSIPNDKPFQNVNRITYGACPRYVKQNTLKLATGMRNVPEKQTRGIFGAIAGFIENGWEGMVDGWYGFRHQNSEGRGQAADLKSTQAAIDQINGKLNRLIGKTNEKFHQIEKEFSEVEGRIQDLEKYVEDTKIDLWSYNAELLVALENQHTIDLTDSEMNKLFEKTKKQLRENAEDMGNGCFKIYHKCDNACIGSIRNGTYDHDVYRDEALNNRFQIKGVELKS

SEQ ID NO: 60 - protein, 500 aa, Artificial Sequence
  Description of Artificial Sequence: Synthetic polypeptide
TATLCLGHHAVPNGTLVKTITNDQIEVTNATELVQSSSTGKICNSPHQILDGKNCTLIDALLGDPHCEEFQNKEWDLFVERSTAYSNCYPYYVPDYASLRSLVASSGTLKFTKEDFNWTGVSQDGSSFSCKRKSVNSFFSRLNWLHKSTNKYPALNVTMPNIDKFDKLYIWGVHHPSTDSDQISLYAQASGRVMVSTKRSQQAVIPNIGSRPWVRGVSSIISIHWTIVKPGDILLINSTGNLIAPRGYFKIRGGKSSIMRSDEPIDNCNFDCITPNGSIPNDKPFQNVNRITYGACPRYVKQNTLKLATGMRNVPEKQTRGIFGAIAGFIENGWEGMVNGWYGFRHQNSEGTGQAADLKSTQAAISQINGKLNRLIEKTNEKFHQIEKEFSEVEGRVQDLEKYVEDTKIDLWSYNAELLVALENQHTIDLTDSEMNKLFERTRKQLRENAEDMGNGCFKIYHKCDNACIGSIRNGTYDHDVYRDEALNNRFQIKGVELKS

SEQ ID NO: 61 - protein, 500 aa, Artificial Sequence
  Description of Artificial Sequence: Synthetic polypeptide
TATLCLGHHAVPNGTLVKTITDDQVEVTNATELVQNSSAGRICDNPHRILDGKNCTLIDALLGDPHCDSFKNKEWDLFVERSEAYSDCYPYDVPDYDYIRSIVASSGTLEFTNESFNWTGVAQDGTSNSCKRGSVKSFFSRLNWLHKLEYKYPALNVTMPNNDRFDKLYIWGVHHPSTDSDQTNLYVQASGKVVVSTKRSQQTVIPNIGFRPWIRGISSRISIYWTIVKPGDILLINSTGNLIAPRGYFKIRSGKSSIMRSDTPIGNCNSECITPNGSIPNDKPFQNVNRITYGACPRYIKRNTLKLATGMRNVPEKQTRGIFGAIAGFIENGWEGMIDGWYGFRHQNSEGTGQAADLKSTQAAINQINGKLNRLVEKTNEKFHQIEKEFSEVEGRIQDLEKYIEDTKIDLWSYNAELLIALENQHTIDLTDSEMNKLFEKTKKQLRENAEDMGNGCFKIYHKCDNACIGSIRNGTYDHNVYRDEALNNRFQIKGVKLKS

SEQ ID NO: 62 - protein, 500 aa, Artificial Sequence
  Description of Artificial Sequence: Synthetic polypeptide
TATLCLGHHAVPNGTLVKTVTDDQIEVTNATELVQSLSTGKICNSPHQILDGGNCTLIDALLGDPHCDRFQNRKWDLFVERSTAYSNCYPYDVPDYASLRSLIASSGTLEFTKEDFNWTGVAQDGASYSCKRGSVKSFFSRLNWLHKLEYKYPALNVTMPNNDRFNKLYIWGVHHPSTDSDQTRLYVQASGKVTVSTKRSQQTVIPNIGPIPWIRGVSSRISIYWTIVNPGDILLINSTGNLIAPRGYFKLRNGRSSVMRSDAPIDNCNSECITPNGSIPNDKPFQNVNRITYGTCPRYVKQNTLKLATGMRNVPEKQTRGIFGAIAGFIENGWEGMVDGWYGFRHQNSEGTGQAADLKSTQTAINQINGKLNRLIEKTNEKFHQIEKEFSEVEGRIQDLEKYVEDTKIDLWSYNAELLVALENQHTVDLTDSEMNKLFEKTRRQLRENAEDMGNGCFKIYHKCDNACIGSIINGTYDHDVYRDEALNNRFQIKGVELKS

SEQ ID NO: 63 - protein, 500 aa, Artificial Sequence
  Description of Artificial Sequence: Synthetic polypeptide
MAMLCLGHHAVPNGTLVKTITNDHIEVTNATELVQSSSMGRICNSPHQILDGENCTLIDALLGDPHCDAFQNKEWDLFVERSTAYSNCYPYDVPDYASLRALVASSGTLEFNNENFNWTGVAQNGASTACKRRSSNSFFSRLNWLYQLRYKYPALNVTMPNNEKFDKLYIWGVHHPSTDNDQISLYAQASGRVIVSTKRSQQTVIPNIGSRPWVRGVSSTISIYWTIVKAGDILLINSTGNLIAPRGYFKIRNGKSSIMRSNAPIGRCNAGCITPNGSISNDKPFQNVNRITYGACPRYVKQKTLRLATGMRNVPEKQTRGIFGAIAGFIENGWEGMVDGWYGFRHQNSEGTGQAADLKSTQAAISQISGKLNRLIGKTNEKFHQIEKEFSEVEGRIQDIEKYVEDTKIDLWSYNAELLVALENQHTIDLTDSEMNKLFERTRKQLRENAEDMGNGCFKIYHKCDNACIESIRNGTYDHDVYRDEALNNRFQIKGIELKS

SEQ ID NO: 64 - protein, 500 aa, Artificial Sequence
  Description of Artificial Sequence: Synthetic polypeptide
TATLCLGHHAVPNGTLVKTITNDQIEVTNATELVQSSSTGRICDSPHRILDGKNCTLIDALLGDPHCDGFQNKEWDLFIERSKAYSNCYPYDVPDYSSLRSLVASSGTLEFTNEDFNWTGVAQDGGSYSCKRGSVKSFFSRLNWLHKLEYKYPALNVTMPNNDKFDKLYIWGVHHPATDKDQISLYAQAAGRIIVSTKRSQQAVIPNIGSRPRVRDIPSRISIYWTIVRPGDILLINSPGNLIAPRGYFKIRSGKSSIMRSDAPIGKCNSACITPNGSIPNDKPFQKVNRITYGACPRYVKQNAVKLATGMRNRPEKQTRGIFGAIAGFIENGWEGMVHGWDGFTHQPSGGTGQAADLKSTQAAIDQINGKLNRLIGKTNEKFHQIEKEFSEVEGRIQDLEKYVEDTKIDLWSYNAELLVALENQHTIDLTDSEMNKLFEKTKKQLRENAEDMGNGCFKIYHKCDNACIGSIRNGTYDHDVYRDEALNNRFQIKGVELKS

SEQ ID NO: 65 - protein, 499 aa, Artificial Sequence
  Description of Artificial Sequence: Synthetic polypeptide
TATLCLGHHAVPNGTIVKTITNDRIEVTNATELVQNSSIGEICDSPHQILDGENCTLIDALLGDPQCDGFQNKKWDLFVERSKAYSNCYPYDVPDYASLRSLVASSGTLEFNNESNWTGVKQNGTSSACIRKSSSSFFSRLNWLTHLNYTYPALNVTMPNNEQFDKLYIWGVHHPGTDKDQIFLYAQSSGRITVSTKRSQQAVIPNIGSRPRIRDIPSRISIYWTIVKPGDILLINSTGNLIAPRGYFKIQSGKSSIMRSDAPIGKCKSECITPNGSIPNDKPFQNVNRITYGACPRYVKHSTLKLATGMRNVPEKQTRGIFGAIAGFIENGWEGMVDGWYGFRHQNSEGRGQAADLKSTQAAIDQINGKLNRLIGKTNEKFHQIEKEFSEVEGRIQDLEKYVEDTKIDLWSYNAELLVALENQHTIDLTDSEMNKLFEKTKKQLRENAEDMGNGCFKIYHKCDNACIGSIRNGTYDHNVYRDEALNNRFQIKGVELKS

SEQ ID NO: 66 - protein, 511 aa, Artificial Sequence
  Description of Artificial Sequence: Synthetic polypeptide
SDQICIGYHANNSTEQVDTIMEKNVTVTHAQDILERTHNGKLCDLNGVKPLILRDCSVAGWLLGNPMCDEFINVPEWSYIVEKASPANDLCYPGNFNDYEELKHLLSRISHFEKIQIIPKSSWSNHDASSGVSSACPYLGKSSFFRNVVWLIKKNSTYPTIKRSYNNTNQEDLLVLWGIHHPNDAAEQTKLYQNPTTYISVGTSTLNQRLVPEIATRPKVNGQSGRIEFFWTILKPNDAINFESNGNFIAPEYAYKIVKKGDSTIMKSELEYGNCNTKCQTPMGAINSSMPFHNIHPLTIGECPKYVKSNRLVLATGLRNAPQRERRRKKRGLFGAIAGFIEGGWQGMVDGWYGYHHSNEQGSGYAADQESTQKAIDGVTNKVNSIINKMNTQFEAVGREFNNLERRIENLNKKMEDGFLDVWTYNAELLVLMENERTLDFHDSNVKNLYDKVRLQLRDNAKELGNGCFEFYHKCDNECMESVKNGTYDYPQYSEEARLNREEISGVKLES

SEQ ID NO: 67 - protein, 511 aa, Artificial Sequence
  Description of Artificial Sequence: Synthetic polypeptide
SDQICIGYHANNSTELVDTIMEKNVTVTHAQDILEKTHNGKLCDLDGVKPLILRDCSVAGWLLGNPMCDEFINVPEWSYIVEKANPANDLCYPGDFNDYEELKHLLSRINHFEKIQIIPKSSWPNHEASSGVSSACPYQGKSSFFRNVVWLIKKNSAYPTIKRSYNNTNQEDLLVLWGIHHPNDAAEQTKLYQNPTTYISVGTSTLNQRLVPKIATRSKVNGQSGRMEFFWTILKPNDAINFESNGNFIAPEYAYKIVKKGDSAIMKSELEYGNCNTKCQTPLGAINSSMPFHNIHPLTIGECPKYVKSNRLVLATGLRNTPQRERRRKKRGLFGAIAGFIEGGWQGMVDGWYGYHHSNEQGSGYAADKESTQKAIDGVTNKVNSIIDKMNTQFEAVGREFNNLERRIENLNKKMEDGFLDVWTYNAELLVLMENERTLDFHDSNVKNLYDKVRLQLRDNAKELGNGCFEFYHKCDNECMESVKNGTYDYPQYSEEARLNREEISGVKLES

SEQ ID NO: 68 - protein, 511 aa, Artificial Sequence
  Description of Artificial Sequence: Synthetic polypeptide
SDQICIGSHANNSTEQVDTIMEKNVTVTHAQDILEKTHNGKLCDLDGVKPLILRDCSVAGWLLGNPMCDEFINVPEWSYIVEKASPANDLCYPGDFNDYEELKHLLSRINHFEKIQIIPKSSWSNHEASSGVSSACPYLGRPSFFRNVVWLIKKNNTYPTIKRSYNNTNQEDLLVLWGIHHPNDEAEQIKLYQNPTTYISVGTSTLNQRLVPKIATRSKVNGQSGRMEFFWAILKPNDAINFESNGNFIAPEYAYKIVKKGDSAIMKSELEYGNCNTKCQTPMGAINSSMPFHNIHPLTIGECPKYVKSNRLVLATGLRNAPQRERRRKKRGLFGAIAGFIEGGWQGMVDGWYGYHHSNEQGSGYAADKESTQKAIDGVTNKVNSIIDKMNTQFEAIGREFNNLERRIENLNKKMEDGFLDVWTYNAELLVLMENERTLDFHDSNVKNLYEKVRLQLRDNAKGLGNGCFEFYHKCDNECMESVKNGTYDYPQYSEEATLNREEISGVKLES

SEQ ID NO: 69 - protein, 511 aa, Artificial Sequence
  Description of Artificial Sequence: Synthetic polypeptide
SDQICIGYHANNSTEQVDTIMEKNVTVTHAQDILEKTHNGKLCDLDGVKPLILRDCSVAGWLLGNPMCDEFINVPEWSYIVEKANPVNDLCYPGDFNDYEELKHLLSRINHFEKIQIIPKSSWSSHEASLGVSSACPYQGKSSFFRNVVWLIKKNSTYPTIKRSYNNTNQEDLLVLWGIHHPNDAAEQTKLYQNPTTYISVGTSTLNQRLVPRIATRSKVNGQSGRMEFFWTILKPNDAINFESNGNFIAPEYAYKIVKKGDSTIMKSELEYGNCNTKCQTPMGAINSSMPFHNIHPLTIGECPKYVKSNRLVLATGLRNSPQRERRRKKRGLFGAIAGFIEGGWQGMVDGWYGYHHSNEQGSGYAADKESTQKAIDGVTNKVNSIIDKMNTQFEAVGREFNNLERRIENLNKKMEDGFLDVWTYNAELLVLMENERTLDFHDSNVKNLYDKVRLQLRDNAKELGNGCFEFYHKCDNECMESVRNGTYDYPQYSEEARLKREEISGVKLES

SEQ ID NO: 70 - protein, 511 aa, Artificial Sequence
  Description of Artificial Sequence: Synthetic polypeptide
SDQICIGYHANNSTEQVDTIMEKNVTVTHAQDILEKTHNGKLCDLDGVKPLILRDCSVAGWLLGNPMCDEFINVPEWSYIVEKANPANDLCYPGNFNDYEELKHLLSRINHFEKIQIIPKSSWSDHEASSGVSSACPYQGTPSFFRNVIWLIKKNNTYPTIKRSYNNTNQEDLLILWGIHHSNDAAEQTKLYQNPTTYISVGTSTLNQRLVPKIATRSKVNGQSGRMDFFWTILKPNDAINFESNGNFIAPEYAYKIVKKGDSAILKSEVEYGNCNTKCQTPIGAINSSMPFHNIHPLTIGECPKYVKSNKLVLATGLRNSPLRERRRKKRGLFGAIAGFIEGGWQGMVDGWYGYHHSNEQGSGYAADKESTQKAIDGVTNKVNSIIDKMNTQFEAVGREFNNLERRIENLNKKMEDGFLDVWTYNAELLVLMENERTLDFHDSNVKNLYDKVRLQLKDNAKELGNGCFEFYHKCDNECMESVRNGTYDYPQYSEEARLKREEISGVKLES

SEQ ID NO: 71 - protein, 510 aa, Artificial Sequence
  Description of Artificial Sequence: Synthetic polypeptide
SDQICIGYHANNSTEQVDTIMEKNVTVTHAQDILEKTHNGKLCNLDGVKPLILRDCSVAGWLLGNPMCDEFLNVPEWSYIVEKINPANDLCYPGNFNDYEELKHLLSRINHFEKIQIIPKNSWSDHEASGVSSACPYQGRSSFFRNVVWLTKRDNAYPTIKRSYNNTNQEDLLVLWGIHHPNDAAEQTRLYQNPTTYISVGTSTLNQRLVPKIATRSKVNGQSGRMEFFWTILKSNDAINFESNGNFIAPENAYKIVKKGDSTIMKSELEYGNCNTKCQTPIGAINSSMPFHNIHPLTIGECPKYVKSNRLVLATGLRNSPQRERRRKKRGLFGAIAGFIEGGWQGMVDGWYGYHHSNEQGSGYAADKESTQKAIDGVTNKVNSIIDKMNTQFEAVGREFNNLERRIENLNKKMEDGFLDVWTYNAELLVLMENERTLDFHDSNVKNLYDKVRLQLRDNAKELGNGCFEFYHRCDNECMESVRNGTYDYPQYSEEARLKREEISGVKLES

SEQ ID NO: 72 - protein, 511 aa, Artificial Sequence
  Description of Artificial Sequence: Synthetic polypeptide
SDQICIGYHANNSTEQVDTIMEKNVTVTHAQDILEKTHNGKLCNLDGVKPLILKDCSVAGWLLGNPMCDEFLNVSEWSYIVEKASPANGLCYPGDFNDYEELKHLLSRINHLKKIKIIPKSYWSNHEASSGVSAACSYLGEPSFFRNVVWLIKKNNTYPPIKVNYTNTNQEDLLVLWGIHHPNDEKEQIRIYQNPNTSISVGTSTLNQRLVPKIATRPKVNGQSGRMEFFWTILKPNDSINFDSNGNFIAPEYAYKIAKKGDSVIMKSELEYGNCNTKCQTPMGAINSSMPFHNIHPLTIGECPKYVKSNRLVLATGLRNAPQRERRRKKRGLFGAIAGFIEGGWQGMVDGWYGYHHSNEQGSGYAADKESTQKAIDGITNKVNSIIDKMNTQFEIVGREFNNLERRIENLNKKMEDGFLDVWTYNAELLVLMENERTLDFHDSNVKNLYEKVRLQLRDNAKELGNGCFEFYHKCDNECMESVRNGTYDYPQYSEEARLSREEISGVKMES

SEQ ID NO: 73 - protein, 511 aa, Artificial Sequence
  Description of Artificial Sequence: Synthetic polypeptide
SDQICIGYHANNSTEQVDTIMEKNVTVTHAQDILEKTHNGKLCDLDGVKPLILRDCSVAGWLLGNPMCDEFLNVPEWSYIVEKINPANDLCYPGNFNDYEELKHLLSRINHFEKIQIIPKSSWSDHEASSGVSSACPYQGRSSFFRNVVWLIKKNDAYPTIKISYNNTNQEDLLVLWGIHHPNDAAEQTRLYQNPTTYISVGTSTLNLRLVPKIATRSKVNGQSGRMEFFWTILKPNDAINFESNGNFIAPENAYKIVKKGDSTIMKSELEYGNCNTKCQTPVGAINSSMPFHNIHPLTIGECPKYVKSNRLVLATGLRNSPQRERRRKKRGLFGAIAGFIEGGWQGMVDGWYGYHHSNEQGSGYAADKESTQKAIDGVTNKVNSIIDKMNTQFEAVGREFNNLERRIENLNKKMEDGFLDVWTYNAELLVLMENERTLDFHDSNVKNLYDKVRLQLRDNAKELGNGCFEFYHRCDNECMESVRNGTYDYPQYSEESRLKREEISGVKLES

SEQ ID NO: 74 - protein, 511 aa, Artificial Sequence
  Description of Artificial Sequence: Synthetic polypeptide
SDQICIGYHANNSTEQVDTIMEKNVTVTHAQDILEKTHNGKLCDLDGVRPLILRDCSVAGWLLGNPMCDEFINVPEWSYIVEKANPVNDLCYPGVFNDYEELKHLLSRINHFEKIQIIPKSSWPSHEASLGVSAACPYQGQSSFFRNVVWLIKKNNTYPTIKRSYNNTNQEDLLVMWGIHHPNDAAEQTKLYQNPTTYISVGTSTLNQRLTPRIATRSKVNGQSGRMEFFWTILKPNDAINFESNGNFIAPEYAYKIVKKGDSTIMRSELEYGNCNTKCQTPMGAINSSMPFHNIHPLTIGECPKYVKSTRLVLATGLRNSPQRERRRKKRGLFGAIAGFIEGGWQGMVDGWYGYHHSNEQGSGYAADKESTQKAIDGVTNKVNSIIDKMNTQFEAVGREFNNLERRIENLNKKMEDGFLDVWTYNAELLVLMENERTLDFHDSNVKNLYDKVRLQLRDNAKELGNGCFEFYHKCDNECMESVRNGTYDYPQYSEEARLKREEISGVKLES

SEQ ID NO: 75 - protein, 510 aa, Artificial Sequence
  Description of Artificial Sequence: Synthetic polypeptide
SDQICIGYHANNSTEQVDTIMEKNVTVTHAQDILEKTHNGKLCNLDGVKPLILRDCSVAGWLLGNPMCDEFLNVPEWSYIVEKINPANDLCYPGNFNDYEELKHLLSRINHFEKIQIIPKDSWSDHEASGVSSACPYQGRSSFFRNVVWLTKKNDAYPTIKKSYNNTNQEDLLVLWGIHHPNDAAEQTRLYQNPTTYISVGTSTLNQRLVPKIATRSKVNGQSGRMEFFWTILKSNDAINFESNGNFIAPENAYKIVKKGDSTIMKSELEYSNCNTKCQTPIGAINSSMPFHNIHPLTIGECPKYVKSNRLVLATGLRNSPQRERRRKKRGLFGAIAGFIEGGWQGMVDGWYGYHHSNEQGSGYAADKESTQRAIDGVTNKVNSIIDKMNTQFEAVGREFNNLERRIENLNKKMEDGFLDVWTYNAELLVLMENERTLDFHDSNVKNLYDKVRLQLRDNAKELGNGCFEFYHRCDNECMESVRNGTYDYPQYSEEARLKREEISGVKLES

SEQ ID NO: 76 - protein, 537 aa, Artificial Sequence
  Description of Artificial Sequence: Synthetic polypeptide
DRICTGITSSNSPHVVKTATQGEVNVTGVIPLTTTPTKSHFANLKGTQTRGKLCPNCFNCTDLDVALGRPKCMGNTPSAKVSILHEVKPATSGCFPIMHDRTKIRQLPNLLRGYENIRLSTSNVINTETAPRGSYKVGTSGSCPNVANGNGFFNTMAWVIPKDNNKTAINPVTVEVPYICSEGEDQITVWGFHSDDKTQMERLYGDSNPQKFTSSANGVTTHYVSQIGGFPNQTEDEGLKQSGRIVVDYMVQKPGKTGTIVYQRGILLPQKVWCASGRSKVIKGSLPLIGEADCLHEKYGGLNKSKPYYTGEHAKAIGNCPIWVKTPLKLANGTKYRPPAKLLKERGFFGAIAGFLEGGWEGMIAGWHGYTSHGAHGVAVAADLKSTQEAINKITKNLNYLSELEVKNLQRLSGAMNELHDEILELDEKVDDLRADTISSQIELAVLLSNEGIINSEDEHLLALERKLKKMLGPSAVEIGNGCFETKHKCNQTCLDRIAAGTFNAGDFSLPTFDSLNITAASLNDDGLDNHTILLYY

SEQ ID NO: 77 - protein, 537 aa, Artificial Sequence
  Description of Artificial Sequence: Synthetic polypeptide
DRICTGITSSNSPHVVKTATQGEVNVTGVIPLTTTPTKSHFANLKGTQTRGKLCPNCLNCTDMDVALGRPKCMGTIPSAKVSILHEVKPVTSGCFPIMHDRTKIRQLPNLLRGYENIRLSTRNVINAETAPGGPYTVGTSGSCPNVTNGKGFFETMAWAVPKNKNKTATNPLTVEVPYICTKGEDQITVWGFHSDDETLMVILYGDSKPQKFTSSANGVTTHYVSQIGGFPNQTEDEGLKQSGRIVVDYIVQKPGKTGTIVYQRGVLLPQKVWCASGRSKVIKGSLPLIGEADCLHEKYGGLNKSKPYYTGEHAKAIGNCPIWVKTPLKLANGTKYRPPAKLLKERGFFGAIAGFLEGGWEGMIAGWHGYTSHGAHGVAVAADLKSTQEAINKITKNLNSLSELEVKNLQRLSGAMDELHNEILELDEKVDDLRADTISSQIELAVLLSNEGIINSEDEHLLALERKLKKMLGPSAVEIGNGCFETKHKCNQTCLDRIAAGTFNAGEFSLPTFDSLNITAASLNDDGLDNHTILLYY

SEQ ID NO: 78 - protein, 535 aa, Artificial Sequence
  Description of Artificial Sequence: Synthetic polypeptide
DRICTGITSSNSPHVVKTATQGEVNVTGVIPLTTTPTKSHFANLKGTQTRGKLCPNCLNCTDLDVALGRPKCMGNIPSAKASILHEVKPGTSGCFPIMHDRTKIRQLPNLLRGYENIRLSARNVTNAETAPGGPYIVGTSGSCPNVTNGNGFFATMAWAVPKNKTATNPLTVEVPYICTKGEDQITVWGFHSDDETQMVKLYGDSKPQKFTSSANGVTTHYVSQIGGFPNQAEDEGLPQSGRIVVDYMVQKPGKTGTIAYQRGVLLPQKVWCASGRRKVIEGSLPLIGEADCLHEKYGGLNKSKPYYTGEHAKAIGNCPIWVKTPLKLANGTKYRPPAKLLKERGFFGAIAGFLEGGWEGMIAGWHGYTSHGAHGVAVAADLKSTQEAINKITKNLFSLSELEVKNLHRLSGAMDELHNEILELDEKVDDLRADTISSQIELAVLLSNEGIINSEDEHLLALERKLKKMLGPSAVEIGNGCFETKHKCNQTCLDRIAAGTFNAGEFSLPTFDSLNITAASLNDDGLDNHTILLYY

SEQ ID NO: 79 - protein, 538 aa, Artificial Sequence
  Description of Artificial Sequence: Synthetic polypeptide
DRICTGITSSNSPHVVKTATQGEVNVTGVIPLTTTPTKSHFANLKGTKTRGKLCPKCLNCTDLDVALGRPKCMGTIPSAKASILHEVKPVTSGCFPIMHDRTKIRQLPNLLRGYENIRLSTHNVINAEAAPGGPYIVGTSGSCPNVTNGNGFFATMAWAVPKNNNNKTATNPLTVEVPFICTEGEDQITVWGFHSDNEIQMVKLYGDSKPQKFTSSANGVTTHYVSQIGGFPKQAEDGGLPQSGRIVVDYMVQKSGKTGTITYQRGILLPQKVWCASGRSKVIKGSLPLIGEADCLHEKYGGLNKSKPYYTGEHAKAIGNCPIWVKTPLKLANGTKYRPPAKLLKERGFFGAIAGFLEGGWEGMIAGWHGYTSHGAHGVAVAADLKSTQEAINKITKNLNSLSELEVKNLQRLSGAMDELHNEILELDEKVDDLRADTISSQIELAVLLSNEGIINSEDEHLLALERKLKKMLGPSAVDIGNGCFETKHKCNQTCLDRIAAGTFNAGEFSLPTFDSLNITAASLNDDGLDNHTILLYY

SEQ ID NO: 80 - protein, 536 aa, Artificial Sequence
  Description of Artificial Sequence: Synthetic polypeptide
DRICTGITSSNSPHVVKTATQGEVNVTGVIPLTTTPTKSHFANLKGTKTRGKLCPNCLNCTDLDVALGRPMCIGNIPSAKASILHEVRPVTSGCFPIMHDRTKIRQLPNLLRGYEHIRLSTHNVINAERAPGGPYRLGTSGSCPNVTSRSGFFATMAWAVPRDNKTATNPLTVEVPYICTKGEDQITVWGFHSDNETQMKNLYGDSNPQKFTSSANGITTHYVSQIGGFPNQTEDGGLPQSGRIVVDYMVQKPGKTGTIVYQRGVLLPQKVWCASGRSKVIKGSLPLIGEADCLHEKYGGLNKSKPYYTGEHAKAIGNCPIWVKTPLKLANGTKYRPPAKLLKERGFFGAIAGFLEGGWEGMIAGWHGYTSHGAHGVAVAADLKSTQEAINKITKNLNSLSELEVKNLQRLSGAMDELHNEILELDEKVDDLRADTISSQIELAVLLSNEGIINSEDEHLLALERKLKKMLGPSAVDIGNGCFETKHKCNQTCLDRIAAGTFNAGEFSLPTFDSLNITAASLNDDGLDNHTILLYY

SEQ ID NO: 81 - protein, 538 aa, Artificial Sequence
  Description of Artificial Sequence: Synthetic polypeptide
DRICTGITSSNSPHVVKTATQGEVNVTGVIPLTTTLTKSHFANLKGTKTRGKLCPKCLNCTDLDVALGRPKCTGNIPSAKVSILHEVRPVTSGCFPIMHDRTKIRQLPNLLRGYERIRLSNHNVINAEKAPGGPYKIGTSGSCPNVTNGNGFFATMAWAVPKNENNKTATNSLTIEVPYICTEGEDQITVWGFHSDNEIQMVKLYGDSKPQKFTSSANGVTTHYVSQIGGFPNQIEDGGLPQSGRIVVDYMVQKSGKTGTITYQRGILLPQKVWCASGRSKIIKGSLPLIGEADCLHEKYGGLNKSKPYYTGEHAKAIGNCPIWVKTPLKLANGTKYRPPAKLLKERGFFGAIAGFLEGGWEGMIAGWHGYTSHGAHGVAVAADLKSTQEAINKITKNLNSLSELEVKNLQRLSGAMDELHNEILELDEKVDDLRADTISSQIELAVLLSNEGIINSEDEHLLALERKLKKMLGPSAVEIGNGCFETKHKCNQTCLDRIAAGTFNAGEFSLPTFDSLNITAASLNDDGLDNHTILLYY

SEQ ID NO: 82 - protein, 537 aa, Artificial Sequence
  Description of Artificial Sequence: Synthetic polypeptide
DRICTGITSSNSPHVVKTATQGEVNVTGAIPLTTTPAKSHFANLKGTKTRGKLCPTCLNCTDLDVALGGPMCVGITPSAKASILHEVRPVTSGCFPIMHDRTKIRQLPNLLRGYEKIRLSAQNVINAEKAPGGPYKLGTSGSCPNATSKSGFFATMAWAVPRDDNKTATNPLTVEVPHICANEEDQITVWGFHSDNKTQMKNLYGDSNPQKFTSSANGITTHYVSQIGGFPDQTEDGGLPQSGRIVVDYMVQKPGKTGTIVYQRGILLPQKVWCASGRSKVIKGSLPLIGEADCLHEKYGGLNKSKPYYTGEHAKAIGNCPIWVKTPLKLANGTKYRPPAKLLKERGFFGAIAGFLEGGWEGMIAGWHGYTSHGAHGVAVAADLKSTQEAINKITKNLNSLSELEVKNLQRLSGAMDELHNEILELDEKVDDLRADTISSQIELAVLLSNEGIINSEDEHLLALERKLKKMLGPSAVDIGNGCFETKHKCNQTCLDRIAAGTFNAGEFSLPTFDSLNITAASLNDDGLDNHTILLYY

SEQ ID NO: 83 - protein, 537 aa, Artificial Sequence
  Description of Artificial Sequence: Synthetic polypeptide
DRICTGITSSNSPHVVKTATQGEVNVTGVIPLTTTPTKSYFANLKGTRTRGKLCPDCLNCTDLDVALGRPMCVGTTPSAKASILHEVRPVTSGCFPIMHDRTKIRQLPNLLRGYENIRLSTQNVIDAENAPGGPYRLGTSGSCPNATSKSGFFATMAWAVPKDNNKNATNPLTVEVPYVCKEGEDQITVWGFHSDNKTQMKNLYGDSNPQKFTSSANGVTTHYVSQIGGFPAQTEDGGLPQSGRIVVDYMVQKPRKTGTIVYQRGVLLPQRVWCASGRSKVIKGSLPLIGEADCLHEKYGGLNKSKPYYTGEHAKAIGNCPIWVKTPLKLANGTKYRPPAKLLKERGFFGAIAGFLEGGWEGMIAGWHGYTSHGAHGVAVAADLKSTQEAINKITKNLNSLSELEVKNLQRLSGAMDELHNEILELDEKVDDLRADTISSQIELAVLLSNEGIINSEDEHLLALERKLKKMLGPSAVDIGNGCFETKHKCNQTCLDRIAAGTFNAGEFSLPTFDSLNITAASLNDDGLDNHTILLYY

SEQ ID NO: 84 - protein, 537 aa, Artificial Sequence
  Description of Artificial Sequence: Synthetic polypeptide
DRICTGITSSNSPHVVKTATQGEVNVTGVIPLTTTPTKSYFANLKGTRTRGKLCPDCLNCTDLDVALGRPMCVGTTPSAKASILHEVRPVTSGCFPIMHDRTKIRQLPNLLRGYENIRLSTQNVIDAEKAPGGPYRLGTSGSCPNATSKSGFFATMAWAVPKDNYKNATNPLTVEVPYICTEGEGQITVWGFHSDNKPQMKNLYGDSNPQKFTSSASGVTTHYVSQIGDFPDQTEDGGLPQSGRIVVDYMMQKPGKTGTIVYQRGVLLPQKVWCASGRSKVIKGSLPLIGEADCLHEKYGGLNKSKPYYTGEHAKAIGNCPIWVITPQKLANGTTFSPPAKLLKERGFFGAIAGFLEGGWEGMIAGWHGYTSHGAHGVAVAADLKSTQEAINKITKNLNSLSELEVKNLQRLSGAMDELHNEILELDEKVDDLRADTISSQIELAVLLSNEGIINSEDEHLLALERKLKKMLGPSAVDIGNGCFETKHKCNQTCLDRIAAGTFNAGEFSLPTFDSLNITAASLNDDGLDNHTILLYY

SEQ ID NO: 85 - protein, 537 aa, Artificial Sequence
  Description of Artificial Sequence: Synthetic polypeptide
DRICTGITSSISPLVDKTATQGEVNVTGVIPLTTTPTKSYFANVKGTRTRGKLCPDCLNCTDLDVALGRPMCVGTTPSAKASILHEVRPVTSGCFPIMHDRTKIRQLPNLLRGYENIRLSTQNVIDAQKAPGGPYRLGTSGSCPNATSKIGFFATMACAVPKDNYKNATNPLTVEVPYIRTEGEDQITVWGFHSDNKTQMKNLYGDSNPPKFTSSANGVTTHYVSQTGDFPDQTEDGGLPPSGRIVVDYMMQKPGKTGTIAYQRGVLLPQKVWCASGRSKVIKGSLPLIGEADCLHEKYGGLNKSKPPHTGEHTKAIGNCPIWVKTPLKLANGTKYRPSAKLLKERGFFGAIAGFLEGGWEGMIAGWHGYTSHGAHGVAVAADLKSTQEAINKITKNLNSLSELEVKNLQRLSGAMDELHNEILELDEKVDDLRADTISSQIELAVLLSNEGIINSEDEHLLALERKLKKMLGPSAVDIGNGCFETKHKCNQTCLDRIAAGTFNAGEFFLPTFDSLNITAASLNDDGLDNHTILLYY

SEQ ID NO: 86 - protein, 537 aa, Artificial Sequence
  Description of Artificial Sequence: Synthetic polypeptide
DRICTEITSSNSPLVVKTATQGEVNVTGVIPLTTTPTKSYFANLKGTRTRGKLCPDCLNCTDLDVALGRPMCVGTTPSAKASILHEVRPVTSGCFPIMHDRTKIRQLPNLLRGYENIRLSTQNVIDAEKAPGGPYRLGTSGSCPNATSKIGFFATMAWAVPKDNYKNATNPLTVEVPYICTEGEDQITVWGFHSDNKTQMKNLYGDSNPQKFTSSANGVTTHYVSQIGDFPDQTEDGGLPQSGRIVVDYMMQKPGKTGPIVYQRGVLLPQKVWCASGRSKVIKGSLPLIGEADCLHEKYGGLNKSKYSHTGDHAKTLGNCPIWVKTPLKLANGTKYRPPAKLLKERGFFGAIAGFLEGGWEGMIAGWHGYTSHGAHGVAVAADLKSTQEAINKITKNLNSLSELEVKNLQRLSGAMDELHNEILELDEKVDDLRADTISSQIELAVLLSNEGIINSEDEHLLALERKLKKMLGPSAVDIGNGCFETKHKCNQTCLDRIAAGTFNAGEFSLPTFDSLNITAASLNDDGLDNHTILLYY

SEQ ID NO: 87 - protein, 538 aa, Artificial Sequence
  Description of Artificial Sequence: Synthetic polypeptide
DRICTGITSSNSPHVVKTATQGEVNVTGVIPLTTTPTKSHFANLKGTETRGKLCPKCLNCTDLDVALGRPKCTGTTPSARASILHEVRPVTSGCFPILHDRTKIRQLPNLLRGYEHIRLSTHNVINAENAPGGPYKIGTSGSCPNITNGNGFFATMAWAVPKNDKNKTATNPLSVEVPYICTEGEDQITVWGFHSDNETQMAKLYGDSKPQKFTSSANGVATHYVSQIGGFPNQTEDGGLPQSGRIVVDYMVQKSGKTGTITYQRGILLPQRGWCASGRSKVIKGSLPLFGEADCLHEKYGGLNKSKPYYTGEHAKAIGNCPIWVKTPLKLANGTKYRPPAKLFKERGFFGAIAGFLEGGWEGMIAGWHGYTSHGAHGVPVAADLKSTQEAINKITKNLNSLSELEVKNLQRLSGAMDELHNEILELDEKVDDLRADTISSQIELAVLLSNEGIINSEDEHLLALERKLKKMLGPSAVEIGNGCFETKHKCNQTCLDRIAAGTFDAGEFSLPTFDSLNITAASLNDDGLDNHTILLYY

SEQ ID NO: 88 - protein, 434 aa, Artificial Sequence
  Description of Artificial Sequence: Synthetic polypeptide
HSIQTRDQNHPETCNQSIITYENNTWVNQTYVNISNANIVAGQDATSMILAGNSSLCPISRWAIYSKDNSIRIGSKGDIFVIREPFISCSHLECRTFFLTQGALLNDKHSNGTVKDRSPYRTLMSCPIGEAPSPYNSRFESVAWSASACHDGMSWLTIGISGPDNGAVAVLKYNGIITDTIKSWRNKILRTQESECACVNGSCFTIMTDGPSNGQASYKIFKIEKGRIIKSIELNAPNYHYEECSCYPDTSKVMCVCRDNWHGSNRPWVSFDQNLDYQIGYICSGVFGDNPRSNDGTGSCGPVSSNGANGVKGFSFRYGNGVWIGRTKSISSRSGFEMIWDPNGWTETDSSFSVKQDIVAITDWSGYSGSFVQHPELTGLDCIRPCFWVELIRGQPKENTIWTSGSSISFCGVNSDTVGWSWPDGAELPFTIDK

SEQ ID NO: 89 - protein, 434 aa, Artificial Sequence
  Description of Artificial Sequence: Synthetic polypeptide
HSIQTGSQNHTGICNQNIITYKNSTWVNQTYVNISNTNVVAGQDTTSVILTGNSSLCPIRGWAIYSKDNSIRIGSKGDVFVIREPFISCSHLECRTFFLTQGALLNDRHSNGTVKDRSPYRALMSCPVGEAPSPYNSRFESVAWSASACHDGMGWLTIGISGPDNGAVAVLKYNGIITETIKSWRKKILRTQESECACVNGSCFTIMTDGPSNGLASYKIFKIEKGKVTKSIELNAPNSHYEECSCYPDTGKVMCVCRDNWHGSNRPWVSFDQNLDYQIGYICSGVFGDNPRPKDGTGSCGPVYVDGANGVKGFSYRYGNGVWIGRTKSNSSRHGFEMIWDPNGWTETDSKFSVRQDVVAMTDWSGYSGSFVQHPELTGLDCMRPCFWVELIRGRPKENTIWTSGSSISFCGVNSDTVDWSWPDGAELPFTIDK

SEQ ID NO: 90 - protein, 434 aa, Artificial Sequence
  Description of Artificial Sequence: Synthetic polypeptide
HSIQTGSQNHTGTCNQSIITYKNSTWVNQTYVNISNTNVVAGKDTTSVILAGNSSLCPIRGWAIYSKDNGVRIGSKGDVFVIREPFISCSHLECRTFFLTQGALLNDKHSNGTVKDRSPYRALMSCPVGEAPSPYNSRFESVAWSASACHDGMGWLTIGISGPDDGAVAVLKYNGIITETIKSWRKEILRTQESECACVNGSCFTIMTDGPSGGPASYKIFKIEKGKVTKSIELDAPNSHYEECSCYPDTGKVMCVCRDNWHGSNRPWVSFDQNLDYQMGYICSGVFGDNPRPKDGKGNCGPVYVDGANGVKGFSYRYGNGVWIGRTKSNSSRQGFEMIWDPNGWTETDSNFFVKQDVVAVTDWSGYSGSFVQHPELTGLDCMRPCFWVELIRGRPKEKTIWTSGSSISFCGVNSDTVDWSWPDGAELPFTIDK

SEQ ID NO: 91 - protein, 435 aa, Artificial Sequence
  Description of Artificial Sequence: Synthetic polypeptide
HSIQTGSQNHTGICNQRIITYENSTWVNQTYVNINNTNVVAGKDTTSVTLAGNSSLCPVRGWAIYSKDNSIRIGSKGDVFVIREPFISCSHLECRTFFLTQGALLNDKHSNGTVKDRSPYRALMSCPIGEAPSPYNSRFESVAWSASACHDGMGWLTIGISGPDDGAVAVLKYNGIITETIKSWRKRILRTQESECVCINGSCFTIMTDGPSNGPASYRIFKIEKGKITKSIELDAPNSHYEECSCYPDTGTVMCVCRDNWHGSNRPWVSFNQNLDYQIGYICSGVFGDNPRPKDGKGSCGPVTVDGADGVKGFSYRYGNGVWIGRTKSNSSRKGFEMIWDPNGWTDTDSNFLVKQDVVAMTDWSGYSGSFVQHPELTGLDCMRPCFWVELIRGRPREKTTIWTSGSSISFCGVNSDTVNWSWPDGAELPFTIDK

SEQ ID NO: 92 - protein, 434 aa, Artificial Sequence
  Description of Artificial Sequence: Synthetic polypeptide
HSIQIGTQNQPETCNQSVITYENNTWVNQTYVNISNTNFVAEQTVVSVKLAGNSSLCPVSGWAIYSKDNSVRIGSKGDVFVIREPFISCSHLECRTFFLTQGALLNDKHSNGTIKDRSPYRTLMSCPVGEVPSPYNSRFESVAWSASACHDGTSWLTIGISGPDNGAVAVLKYNGIITDTIKSWRNNILRTQESECACVNGSCFTVMTDGPSNGQASYKIFKIERGKVVKSVELNAPNYHYEECSCYPDSGEITCVCRDNWHGSNRPWVSFNQNLEYKIGYICSGIFGDNPRPNDRTGSCGPVFSNGANGVKGFSFKYGNGVWIGRTKSTSSRSGFEMIWDPNGWTGTDNNFSVKQDIVGITDWSGYSGSFVQHPELTGLDCMRPCFWVELIRGRPKENTIWTSGSSISFCGVTSDTVGWSWPDGAELPFTIDK

SEQ ID NO: 93 - protein, 435 aa, Artificial Sequence
  Description of Artificial Sequence: Synthetic polypeptide
HSIQTGSQNHTGICNQRIITYENSTWVNHTYVNINNTNVVAGKDKTSVTLAGNSSLCSISGWAIYTKDNSIRIGSKGDVFVIREPFISCSHLECRTFFLTQGALLNDKHSNGTVKDRSPYRALMSCPLGEAPSPYNSKFESVAWSASACHDGMGWLTIGISGPDNGAVAVLKYNGIITETIKSWKKRILRTQESECVCVNGSCFTIMTDGPSNGAASYKIFKIEKGKVTKSIELNAPNSHYEECSCYPDTGTVMCVCRDNWHGSNRPWVSFNQNLDYQIGYICSGVFGDNPRPKDGEGSCNPVTVDGADGVKGFSYRYGNGVWIGRTKSNRLRKGFEMIWDPNGWTDTDSDFSVKQDVVAMTDWSGYSGSFVQHPELTGLDCIRPCFWVELVRGRPRENTTIWTSGSSISFCGVNSDTANWSWPDGAELPFTIDK

SEQ ID NO: 94 - protein, 435 aa, Artificial Sequence
  Description of Artificial Sequence: Synthetic polypeptide
HSIQTGSQNHTGICNQRIITYENSTWVNQTYVNINNTNVVAGKDKTSMTLAGNSSLCPIRGWAIYTKDNSIRIGSKGDVFVIREPFISCSHLECRTFFLTQGALLNDKHSNGTVKNRSPYRALMSCPLGEAPSPYNSRFESVAWSASACHDGLGWLTIGISGPDNGAVAVLKYNGIITETIKSWKKRILRTQESECVCMNGSCFTIMTDGPSDGAASYRIFKIEKGRVIKSIELDAPNYHYEECSCYPDTGTVMCVCRDNWHGSNRPWVSFNQNLDYQIGYICSGVLGDNPRPKDGEGSCNPVTADGADGVKGFSYRYGNGVWIGRTKSNRLRKGFEMIWDPNGWTDTDSDFSMKQDIVAMTDWSGYSGSFVQHPELTGLDCMRPCFWVELVRGLPRENTTIWTSGSSISFCGVNSDTANWSWPDGAELPFTIDK

SEQ ID NO: 95 - protein, 435 aa, Artificial Sequence
  Description of Artificial Sequence: Synthetic polypeptide
HSIQTGSQNHTGVCNQRIITYENSTWVNHTYVNINNTNVIVGKDKTSVTLAGNSSLCSISGWAIYTKDNSIRIGSKGDVFVIREPFISCSHLECRTFFLTQGALLNDKHSNGTVKDRSPYRALMSCPLGEAPSPYNSKFESVAWSASACHDGMGWLTIGISGPDNGAVAVLKYNGIITETIKSWKKQILRTQESECVCVNGSCFTIMTDGPSNGAASYKIFKIEKGKITKSIELNAPNFHYEECSCYPDTGTVMCVCRDNWHGSNRPWVSFNQNLDYQIGYICSGVFGDNPRPKDGEGSCNPVTVDGANGVKGFSYKYGNGVWIGRTKSNRLRKGFEMVWDPNGWTDTDSDFSVKQDVVAITDWSGYSGSFVQHPELTGLNCIRPCFWVELVRGLPKENTTIWTSGSSISFCGVNSDTANWSWPDGAELPFTIDK

SEQ ID NO: 96 - protein, 434 aa, Artificial Sequence
  Description of Artificial Sequence: Synthetic polypeptide
HSIQTGWKNHTETCIQNVITYENNTWVNQTYVNISNTKTVTGQGVASTMVAGNSSLCPINGWAVYSKDNSIRIGSKGDIFVIREPFISCSNLECRTFFLTQGALLNDRHSNGTVKDRSPYRTLMSCPIGEAPSPYNSRFESVAWSASACHDGVGWLTIGISGPDNGAVAVLKYNGIITDTIKSWRNKILRTQESECVCINGSCFTIMTDGPSNEQASYKVFKIEKGKIIKTIELDAPNYHYEECSCYPDTSKVMCVCRDNWHASNRPWVSFDQNLNYQIGYICSGVFGDNPRSNDGKGSCGPVPSSGANGVKGFSFRYGSGVWIGRTKSISSRSGFEMIWDPNGWTETDSSFSMKQDIIALTDWSGYSGSFVQHPELTGMDCIRPCFWVELIRGQPKESTIWTSGSSISFCGVNSETASWSWPDGADLPFTIDK

SEQ ID NO: 97 - protein, 435 aa, Artificial Sequence
  Description of Artificial Sequence: Synthetic polypeptide
HSIQTGSQNSTGICNQRIITYENSTWVNHTYVNINNTNVVAGEDKTSVTLVGNSSLCSISGWAIYTKDNSIRIGSKGDVFVIREPFISCSHLECRTFFLTQGALLNDKHSNGTVKDRSPYRALMSCPLGEAPSPYNSKFESVAWSASACHDGMGWLTIGISGPDNGAVAVLKYNGIITGTIKSWKKQILRTQESECVCMNGSCFTIMTDGPSNKAASYKIFKIEKGKVTKSIELNAPNFYYEECSCYPDTGIVMCVCRDNWHGSNRPWVSFNQNLDYQIGYICSGVFGDNPRPEDGEGSCNPVTVDGANGVKGFSYKYGNGVWIGRTKSNRLRKGFEMIWDPNGWTNTDSDFSVKQDVVAITDWSGYSGSFVQHPELTGLDCIRPCFWVELVRGLPRENTTIWTSGSSISFCGVNSDTANWSWPDGAELPFTIDK

SEQ ID NO: 98 - protein, 434 aa, Artificial Sequence
  Description of Artificial Sequence: Synthetic polypeptide
HSIQTESQNKPEICNQNVITYENNTWVNQTYVTVSNTNFVAEQAVASVKLVGNSSLCPVSGWAIYSKDNSVRIGSKGDVFVIREPFISCSHLECRTFFLTQGALLNDKHSNGTIKDRSPYRTLMSCPIGEVPSPYNSRFESVAWSASACHDGTSWLTIGISGPDNGAVAVLKYNGIITDTIKSWRKNILRTQESECACVNGSCFTIMTDGPSNGQASYKVFKIERGKVVKSVELNAPNYHYEECSCYPESSEITCVCRDNWHGSNRPWVSFNQNLEYQMGYICSGIFGDNPRPNDKTGSCGPVFSNGANGVKGFSFRYGNGVWIGRTKSTSSRMGFEMIWDPDGWIRTDDKFSVKQDIIGITDWSGYSGSFVQHPELTGLDCMRPCFWVELIRGRPKENTIWTSGSSISFCGVNSDTVGWSWPDGAELPFTIDK

SEQ ID NO: 99 - protein, 434 aa, Artificial Sequence
  Description of Artificial Sequence: Synthetic polypeptide
HSIQTGGKNYSEMCNQNVITYVNNTWVNRTYVNISNTNVATVQGVNSIILSGNSSLCPVSGWAIYSKDNGIRIGSKGDIFVIREPFISCSHLECRTFFLTQGALLNDKHSNGTVKDRSPYRTLMSCPIGEAPSPYNSRFESVAWSASACHDGMGWLTIGISGPDNGAVAVLKYNGIITDTIKSWRNKILRTQESECVCMNGSCFTVLTDGPSDGQASYKILKVEKGKIIKSIELNAPNYHYEECSCYPDAGKVMCVCRDNWHASNRPWVSFDQNLDYQIGYICSGVFGDNPRSNDGKGKCGPVFPNGANGVKGFSFKYGNGIWIGRTKSINSRRGFEMIWDPNGWTETDSSFSMKQDVIALTDWSGYSGSFVQHPELTGMNCIRPCFWVELIRGQPKEGTIWTSGSSISFCGVNSETTSWSWPDGADLPFTIDK

SEQ ID NO: 100 - protein, 434 aa, Artificial Sequence
  Description of Artificial Sequence: Synthetic polypeptide
HSIQIGSQSQIETCNQSVITYENNTWVNQTYVNISNTNFAAGQSVVSVKLAGNSSLCPVSGWAIYSKDNSVRIGSKGDVFVIREPFISCSPFECRTFFLTQGALLNDKHSNGTIKDRSPYRTLMSCPIGEVPSPYNSRFESVAWSASACHDGINWLTIGISGPDSGAVAVLKYNGIITDTIKSWRNNILRTQESECACVNGSCFTIMTDGPSDGQASYKIFRIEKGKIIKSVEMKAPNYHYEECSCYPDSSEITCVCRDNWHGSNRPWVSFNQNLEYQMGYICSGVFGDNPRPNDKTGSCGPVSSNGANGVKGFSFKYGNGVWIGRTKSISSRKGFEMIWDPNGWTGTDNKFSIKQDIVGINEWSGYSGSFVQHPELTGLDCIRPCFWVELIRGRPEENTIWTSGSSISFCGVNSDTAGWSWPDGAELPFTIDK

SEQ ID NO: 101 - protein, 434 aa, Artificial Sequence
  Description of Artificial Sequence: Synthetic polypeptide
HSIQLGSQNYTKTCTQSVITYENNTWVNQTYVNISNTNLAVGQSVVSAKLAGNSSLCPVSGWAIYSKDNSIRIGSKGDVFVIREPFISCSPLECRTFFLTQGALLNDQHSNGTIKDRSPYRTLMSCPIGEVPSPYNSRFESVAWSASACHDGINWLTIGISGPDNGAVAVLKYNGIITDTIKSWRNNILRTQESECVCVNGSCFTVMTDGPSNGQASYKIFRIEKGKIVKSVEMNAPNYHYEECSCYPDSSEITCVCRDNWHGSNRPWVSFNQNLEYQIGYICSGIFGDNPRPNDKTGSCGPVSSNGANGVKGFSFKYGNGVWIGRTKSISSRKGFEMIWDPNGWTGTDNNFSIKQDIVGINEWSGYSGSFVQHPELTGLDCIRPCFWVELIRGRPKENTVWTSGSSISFCGVNSDTVGWSWPDGAELPFTIDK

SEQ ID NO: 102 - protein, 434 aa, Artificial Sequence
  Description of Artificial Sequence: Synthetic polypeptide
HFKQYECDSPASNQVMPCEPIIIERNITEIVYLNNTTIEKEICPKVVEYRNWSKPQCQITGFAPFSKDNSIRLSAGGDIWVTREPYVSCDHGKCYQFALGQGTTLDNKHSNDTIHDRIPHRTLLMNELGVPFHLGTRQVCIAWSSSSCHDGKAWLHVCITGDDKNATASFIYDGRLVDSIGSWSQNILRTQESECVCINGTCTVVMTDGSASGRADTRILFIEEGKIVHISPLSGSAQHVEECSCYPRYPGVRCICRDNWKGSNRPVVDINMEDYSIDSSYVCSGLVGDTPRNDDRSSNSNCKNPNNERGNQGVKGWAFDNGDDVWMGRTISKDLRSGYETFKVIGGWSTPNSKSQINRQVIVDSDNRSGYSGIFSVEGKSCINRCFYVELIRGRKQETRVWWTSNSIVVFCGTSGTYGTGSWPDGANINFMPI

SEQ ID NO: 103 - protein, 434 aa, Artificial Sequence
  Description of Artificial Sequence: Synthetic polypeptide
HFKQHECDSPSSNQVMLCEPIIIERNITEIVYLNNTTIEKETCPKLVEYRNWSKPQCKITGFAPFSKDNSIRLSAGGDIWVTREPYVSCDPGKCYQFALGQGTTLDNKHSNDTIHDRIPHRTLLMNELGVPFHLGTRQVCIAWSSSSCHDGKAWLHVCVTGDDKNATASFIYDGRLVDSIGSWSQNILRTQESECVCINGTCTVVMTDGSASGRADTRILFIEEGKIVHISPLSGSAQHVEECSCYPRYPDVRCICRDNWKGSNRPIVDINMKDYSIDSSYVCSGLVGDTPRNDDRSSKSNCRNPNNERGNHGVKGWAFDNGNDVWMGRTISKDLRSGYETFKVIGGWSTPNSKSQINRQVIVDSDNRSGYSGIFSVEGKSCINRCFYVELIRGREQETRVWWTSNSIVVFCGTSGTYGTGSWPDGANINFMPI

SEQ ID NO: 104 - protein, 434 aa, Artificial Sequence
  Description of Artificial Sequence: Synthetic polypeptide
HFKQYECDSPANNQVMPCEPIIIERNITEIVYLTNTTIEKEICPKLVEYRNWSKPQCKITGFAPFSKDNSIRLSAGGDIWVTREPYVSCDPGKCYQFALGQGTTLDNKHSNDTIHDRIPHRTLLMNELGVPFHLGTRQVCIAWSSSSCHDGKAWLHVCVTGDDENATASFIYDGRLVDSIGSWSQNILRTQESECVCINGTCTVVMTDGSASGRADTRILFIEEGKIVHISPLSGSAQHVEECSCYPRYPGVRCICRDNWKGSNRPVVDINVKDYSIDSRYVCSGLVGDTPRNNDKSSNSNCRNPNNDKGNHGVKGWAFDDGNDVWMGRTISKDSRSGYETFKVIGGWSTPNSKSQINRQVIVDSDNRSGYSGIFSVEGKSCINRCFYVELIRGREQETKVWWTSNSIVVFCGTSGTYGTGSWPDGADINLMSI

SEQ ID NO: 105 - protein, 434 aa, Artificial Sequence
  Description of Artificial Sequence: Synthetic polypeptide
HFKQYECDSPANNQVMPCEPIIIERNITKIMYLTNTTIEKEICPKSVEYRNWSKPQCKITGFAPFSKDNSIRLSAGGAIWVTREPYVSCDPGKCYQFALGQGTTLDNKHSNDTIHDRTPHRTLLMNELGVPFHLGTRQVCIAWSSSSCHDGKAWLHVCVTGYDKNATASFIYDGRLVDSIGSWSQNILRTQESECVCINGTCTVVMTDGSASGKADTKILFIEEGKIVHVSPLSGSAQHVEECSCYPRYPGVRCICRDNWKGSNRPIVDINVKDYSIDSSYVCSGLVGDTPRNNDRSSNSYCRNPNNERGNHGVKGWAFDDGDDVWMGRTISKDSRLGYETFKVIGGWSTPNSKLQINKQVIVDSDNRSGYSGIFSVEGKSCINRCFYVELIRGRRQETRVWWTSNSIVVFCGTSGTYGTGSWPDGADINLMPI

SEQ ID NO: 106 - protein, 434 aa, Artificial Sequence
  Description of Artificial Sequence: Synthetic polypeptide
HFKQYECNSPPNNQVMLCEPTIIERNITEIVYLTNTTIEKEKCPKLVEYRNWSKPQCKITGFAPFSKDNSIRLSAGGDIWVTREPYVSCDPGKCYQFALGQGTTLNNRHSNDTVHDRTPYRTLLMNELGVPFHLGTKQVCIAWSSSSCHDGKAWLHVCVTGHDENATASFIYDGRLVDSIGSWSKNILRTQESECVCINGTCTVVMTDGSASERADTKILFIEEGKIVHISPLSGSAQHVEECSCYPRYPGVRCVCRDNWKGSNRPIVDINVKDYSIVSSYVCSGLVGDTPRKNDSSSSSYCRNPNNEKGSHGVKGWAFDDGNDVWMGRTISEELRSGYETFKVIGGWSTPNSKLQINRQVIVDRGNRSGYSGIFSVEGKSCINRCFYVELIRGRKQENKVWWTSNSIVVFCGTSGTYGTGSWPDGADINLMPI

SEQ ID NO: 107 - protein, 434 aa, Artificial Sequence
  Description of Artificial Sequence: Synthetic polypeptide
HFKQYECNSPPNNQVMLCEPTIIERNITEIVYLTNTTIEKEICPKLAEYRNWSKPQCNITGFAPFSKDNSIRLSAGGDIWVTREPYVSCDPDKCYQFALGQGTTLNNGHSNDTVHDRTPYRTLLMNELGVPFHLGTKQVCIAWSSSSCHDGKAWLHVCVTGDDENATASFIYNGRLVDSIGSWSKKILRTQESECVCINGTCTVVMTDGSASGKADTKILFIEEGKIVHTSPLSGSAQHVEECSCYPRYPGVRCVCRDNWKGSNRPIVDINVKDYSIVSSYVCSGLVGDTPRKNDSSSSSHCLNPNNEEGGHGVKGWAFDDGNDVWMGRTISEKLRSGYETFKVIEGWSKPNSKLQINRQVIVDRGNRSGYSGIFSVEGKSCINRCFYVELIRGRKQETEVLWTSNSIVVFCGTSGTYGTGSWPDGADINLMPI

SEQ ID NO: 108 - protein, 434 aa, Artificial Sequence
  Description of Artificial Sequence: Synthetic polypeptide
HFKQYECNSPPNNQVILCEPTIIERNITEIVYLTNTTIEKEICPKLAEYRNWSKPQCKITGFAPFSKDNSIRLSAGGDIWVTREPYVSCDPDKCYQFALGQGTTLNNRHSNDTVHDRTPYRTLLMNELGVPFHLGTKQVCIAWSSSSCHDGKAWLHVCVTGHDENATASFIYNGRLVDSIGSWSKKILRTQESECVCVNGTCTVVMTDGSASGRADTKILFIEEGQIVHISPLLGSAQHVEECSCYPRYPGVRCVCRDNWKGSNRPIVDINVKDYSIVSSYVCSGLVGDTPRKNDRSSSSNCLNPNNEEGGHGVKGWAFDDGNDVWMGRTISEKLRSGYETFKVIEGWSKPNSKLQINRQVIVDRDDRSGYSGIFSVEGKSCINRCFYVELIRGRKQETEVWWTSNSIVVFCGTPGTYGTGSWPDGADINLMPI

SEQ ID NO: 109 - protein, 434 aa, Artificial Sequence
  Description of Artificial Sequence: Synthetic polypeptide
HFKQYEFNSPPNNQVMLCEPTIIERNITEIVYLTNTTIEKEICPKLAEYRNWSKPQCDITGFAPFSKDNSIRLSAGGDIWVTREPYVSCDPDRCYQFALGQGTTLNNVHSNDTVHDRTPYRTLLMNELGVPFHLGTKQVCIAWSSSSCHDGKAWLHVCVTGDDKNATASFIYNGRLVDSIVSWSKKILRTQESECVCINGTCTVVMTDGSASGKADTKILFIEEGKIVHTSTLSGSAQHVEECSCYPRYPGVRCVCRDNWKGSNRPIVDINIKDYSIVSSYVCSGLVGDTPRKNDSSSSSHCLDPNNEEGGHGVKGWAFDDGNDVWMGRTISEKLRSGYETFKVIEGWSNPNSKLQINRQVIVDRGNRSGYSGIFSVEGKSCINRCFYVELIRGRKEETEVLWTSNSIVVFCGTSGTYGTGSWPDGADINLMPI

SEQ ID NO: 110 - protein, 434 aa, Artificial Sequence
  Description of Artificial Sequence: Synthetic polypeptide
HFKQYECDPPANNQVMTCKPIIIERNTTEIVYLTNVTIEKETYPKIVEYRNWSMPQCKITGFAPFSKDNSIRLSAGGDIWVTREPYVSCEPGKCYQFALGQGTTLDNKHSNDTIHDRTPHRTLLMNELGVPFYLGTRQVCIAWSSSSCYDGKAWLHVCITGHDKNATASFIYDGRLVDSIGSWSMNILRTQESECVCINGTCTVVMTDGSASGKADTRILFIEEGKIIHISPLAGSAQHVEECSCYPRYPGVRCICRDNWKGSNRPIVDINVKDYSIDSSYVCSGLVGDTPRNNDKSSSSYCRNPNNEKGGHGVKGWAFDDGNDLWMGRTISEDIRSGYETFKVIGGWSIPNSKLQVNRQVIVDSNNRSGYSGIFSVEGKSCINRCFYVELIRGRRTEARVGWTSNSIVVFCGTSGTYGTGTWPDGADINLMPI

SEQ ID NO: 111 - protein, 434 aa, Artificial Sequence
  Description of Artificial Sequence: Synthetic polypeptide
HFKQYECSSPSTNQVRLCEPTIIERNITEIVYLTNTTIEKEICPKLAEYRDWSKPQCKIKGFAPFSKDNSIRLSAGGDIWVTREPYVSCDPDKCYQFALGQGTTLNNRHSNDTVHDRTPYRTLLMNELGVPFHLGTKQVCIAWSSSSCHDGKAWLHVCVTGHDENATASFIYNGRLVDSIGSWSKKILRTQESECVCINGTCTVVMTDGSASGRADTKILFIEEGKIVHISQLSGSAQHVEECSCYPRYPGVRCVCRDNWKGSNRPIVDINVKDRSIASSYVCSGLVGDTPRKNDSSSSSHCLTPNNEEGGHGVKGWAFDDGNDVWMGRTISEKLRLGYETFKVIEGWSKPNSKLQINRQVIVDKGNRSGYSGIFSVEGKSCINRCFYVELIRGRKQETEVWWTSNSIVVFCGTSGTYGTGSWPDGADINLMPI

SEQ ID NO: 112 - protein, 434 aa, Artificial Sequence
  Description of Artificial Sequence: Synthetic polypeptide
HFRQCECNSSAINQTMPCEPTKIEKNITEIVYLTNTTIKTEVCPKLVKYRNWAKPQCKITGFAPFSKDNSIRLSAGGAIWVTREPYVSCDLSKCYQFALGQGTTLDNRHSNDTIHDRTPYRTLLMNELGVPFHLGTRQVCIAWSSSSCHDGKAWLHVCVTGYDKNATASLIYDGRLVDSIGSWSQNILRTQESECVCINGTCTVVMTDGSASGKADTRILFVEEGKIIHISPLTGSAQHVEECSCYPRYPGVRCVCRDNWKGSNRPVVDINVKDYKINSSYVCSGLVGNTPRNNDRSSNSNCQNPNNQRGNHGVKGWAFDDGNDIWMGRTISNDSRLGYETFKVIGGWSKPNSKVQTNRQVIVDSDNRSGYSGVFSVEGKSCINRCFYVELIRGRRQETRVWWTSNSIVVFCGTSGTYGSGSWPDGADINLMPI

SEQ ID NO: 113 - protein, 434 aa, Artificial Sequence
  Description of Artificial Sequence: Synthetic polypeptide
HFNQCDCHYPPNNQVTLCEPTITERNTTKIVYLTNTTIEKENCPKLAEYRDWSKPQCKITGFAPFSKDNSIRLSAGGDIWVTREPYVSCDPDKCYQFALGQGTTLNNRHSNDTFHDRTPYRTLLMNELGIPFHLGTKQVCIAWSSSSCHDGKAWLHVCITGHDENATASIIYNGRLVDSIGSWSKKILRTQESECVCINGTCTVVMTDGSASGRADTKILFIEEGKIIHISPLIGSAQHVEECSCYPRYPGVRCICRDNWKGSNRPVVDINVKDYSIVSSYVCSGLVGDTPRKDDKSSSSNCLNPNNEKGEHGVKGWAFDDGKDVWMGRTINETLRSGYETFKVIEGWSKSNSKLQINRQVIVEKSDRSGYSGIFSVEGKSCINRCFYVELIRGRKQETAVWWTSNSIVVFCGTSGTYGTGSWPDGADINLMPV

SEQ ID NO: 114 - protein, 434 aa, Artificial Sequence
  Description of Artificial Sequence: Synthetic polypeptide
HFEQYDCNPFPNNQVMLCKPTIIERNTTEFVYLTNTTIEKEICPKLAEYRNWAKPQCTITGFAPFSRDNSIRLSAGGDIWVTREPYVSCDPDKCYQFALGQGTTLNNGHSNDTVHDRTPYRTLLMNELGVPFHLGTRQVCIAWSSSSCHDGKAWLHVCITGDDKNATASFIYGGKLVDSIGSWSKNILRTQESECVCINGTCTVVMTDGSASGKADTKILFIKEGKIVHISTLSGSAQHVEECSCYPRYPGVRCVCRDNWKGSNRPVVDINVKDYSIASSYVCSGLVGDTPRKNDSFSNSHCLNPNNEEGGHGVKGWAFDDGSDVWMGRTISEKFRLGYETFKVIEGWSRPNSKLQTNRQVIVERGNRSGYSGIFSVEGKSCINRCFYVELIRGRKEETKVWWTSNSIVVFCGTSGTYGTGSWPDGADINIMPI

SEQ ID NO: 115 - protein, 435 aa, Artificial Sequence
  Description of Artificial Sequence: Synthetic polypeptide
HLRQYEFNSPPKNNQVMLCEPTIIERNITEIVYLTNTTIEKEICPKLAEYRNWSKPQCDITGFAPFSKDNSIRLSAGGDIWVTREPYVSCGPDKCFQFALGQGTTLNNVHSNDTVHDRTPYRTLLMSELGVPFHLGTKQVCIAWSSSSCHDGKAWLHVCVTGDDKNATASIIYNGRLVDSIVSWSKKILRTQESECVCINGICTVVMTDGSASGKADTKILFIEEGKIVHTSTLSGSAQHVEECSCYPRYPGVRCVCRDNWKGSNRPIVDINIRDYSIVSNYVCSGLVGDTPRKPDSSSSSNCLDPNDEEGGHGVKGWAFDDGNDVWMGRTISEKSRLGYETFKVIGGWFNPNSKSQINRQVIVDRGNRSGYSGIFSVEGKNCINRCFYVELIRGRKDEIEVLWTSNSIVVFCGTSGTYGTGSWPDGADLKLMSV

SEQ ID NO: 116 - protein, 435 aa, Artificial Sequence
  Description of Artificial Sequence: Synthetic polypeptide
LYSDILLKFSPTEITAPTMPLGCANASNVQAVNRSATKGVTLLLPEPEWTYPRLSCPGSTFQKALLISPHRFGETKGNSAPLIIREPFIACGPNECKHFALTHYAAQPGGYYNGTRGDRNKLRHLISVKLGKIPTVENSIFHMAAWSGSACHDGKEWTYIGVDGPDNNALLKVKYGEAYTDTYHSYANKILRTQESACNCIGGNCYLMITDGSASGVSECRFLKIREGRIIKEIFPTGRVKHTEECTCGFASNKTIECACRDNRYTAKRPFVKLNVEADTAEIRLMCTDTYLDTPRPNDGSITGPCESDGDKGSGGIKGGFVHQRMKSKIGRWYSRTMSKTERMGMGLYVKYDGDPWADSDALAFSGVMVSMKEPGWYSFGFEIKDKKCDVPCIGIEMVHDGGKETWHSAATAIYCLMGSGQLLWDTVTGVDMAL

SEQ ID NO: 117 - protein, 435 aa, Artificial Sequence
  Description of Artificial Sequence: Synthetic polypeptide
LYSDVLLKFSSTKTTAPTMSLECTNASNAQTVNHSATKEMTFPPPEPEWTYPRLSCQGSTFQKALLISPHRFGEIKGNSAPLIIREPFVACGPKECRHFALTHYAAQPGGYYNGTRKDRNKLRHLVSVKLGKIPTVENSIFHMAAWSGSACHDGREWTYIGVDGPDNDALVKIKYGEAYTDTYHSYAHNILRTQESACNCIGGDCYLMITDGSASGISKCRFLKIREGRIIKEILPTGRVEHTEECTCGFASNKTIECACRDNSYTAKRPFVKLNVETDTAEIRLMCTKTYLDTPRPDDGSIAGPCESNGDKWLGGIKGGFVHQRMASKIGRWYSRTMSKTNRMGMELYVKYDGDPWTDSDALTLSGVMVSIEEPGWYSFGFEIKDKKCDVPCIGIEMVHDGGKDTWHSAATAIYCLMGSGQLLWDTVTGVDMAL

SEQ ID NO: 118 - protein, 435 aa, Artificial Sequence
  Description of Artificial Sequence: Synthetic polypeptide
LYSDILLKFSPTKRTAPTMSLECVNVSNAQAVNHSATKEMTFLLPEPEWTYPRLSCQGSTFQKALLISPHRFGETRGNSAPLIIREPFVACGPKECRHFALTHYAAQPGGYYNGTRKDRNKLRHLISVKLGKIPTVENSIFHMAAWSGSACHDGREWTYIGVDGPDSDALIKIKYGEAYTDTYHSYAHNILRTQESACNCIGGDCYLMITDGSASGISKCRFLKIREGRIIKEIFPAGRVEHTEECTCGFASNKTIECACRDNSYTAKRPFVKLNVETDTAEIRLMCTETYLDTPRPDDGSITGPCESNGDKGLGGIKGGFVHQRMASKIGRWYSRTMSKTERMGMELYVKYDGDPWTDSDALAPSGVMVSIKEPGWYSFGFEIKDKKCDVPCIGIEMVHDGGKETWHSAATAIYCLMGSGQLLWDTVTGVDMAL

SEQ ID NO: 119 - protein, 435 aa, Artificial Sequence
  Description of Artificial Sequence: Synthetic polypeptide
LYSDILLKFSPTKITAPTMSLDCANVSNVQAVNRSVTKEMTFLLPEPEWTYPRLSCQGSTFQKALLISPHRFGETRGNSAPLIIREPFVACGPKECRHFALTHYAAQPGGYYNGTRNDRNKLRHLISVKLGKIPTVENSIFHMAAWSGSACHDGREWTYIGVDGPDSNALIKIKYGEAYTDTYHSYANNILRTQESACNCIGGDCYPMITDGSASGISKCRFLKIREGRIIKEIFPTGRVDHTEECTCGFASNKTIECACRDNSYTAKRPFVKLNVETDTAEIRLMCTETYLDTPRPDDGSITGPCESNGDKGLGGIKGGFVHQRMASKTGRWYSRTMSKTERMGMELYVRYDGDPWTDSDALAPSGVMVSMKEPGWYSFGFEIKDKKCDVPCIGIEVVQVGGKETWHSAATAIYCLMGSGQLLWDIVTGVAMAL

SEQ ID NO: 120 - protein, 435 aa, Artificial Sequence
  Description of Artificial Sequence: Synthetic polypeptide
LYSDILLKFSPTEKSAPTMSLDCANASNVQAVNRSATKGMTLLLPEPEWTYPRLSCQGSTFQKALLISPHRFGETRGNSAPLIIREPFIACGPKECKHFALTHYAAQPGGYYNGTREDRNKLRHLISVKLGKIPTVENSIFHMAAWSGSACHDGREWTYIGVDGPDSNALIKIKYGEAYTDTYHSYANNILRTQESACNCIGGDCYLMITDGSASGISKCRFLKIREGRIIKEIFPTGRVDHTEECTCGFASNKTIECACRDNSYTAKRPFVKLNVETDTAEIRLMCTETYLDTPRPDDGSKTGPCESNGDKGSGGIKGGFVHQRMASKIGRWYSRTMSKTERMGMELYVKYDGDPWTDSDALAPSGVMVSMEEPGWYSFGFEIKDKKCDVPCIGIEMVHDGGKNTWHSAATAIYCLMGSGQLLWDTVTGVDMAL

SEQ ID NO: 121 - protein, 435 aa, Artificial Sequence
  Description of Artificial Sequence: Synthetic polypeptide
LYSDILLKFSPTKVIAPTVSLDCANASNVQAVNHSATKEMTFLLPEPEWTYPRLSCQGSTFQKALLISPHRFGEAKGNSAPLIIREPFIACGPKECKHFALTHYAAKPGGYYNGTREDRNKLRHLISVNLGKIPTVENSIFHMAAWSGSACHDGREWTYIGVDGPDSNALIKIKYGEAYTDTYHSYANNILRTQESACNCIGGDCYLMITDGSASGISRCRFLKIREGRIIKEIFPTGRVEHTEECTCGFASNKTIECACRDNSYTAKRPFVKLNVETDTAEIRLMCTETYLDTPRPDDGSITGPCESNGDKGNGGIKGGFVHQRMASRIGRWYSRTMSKTKRMGMELYVKYDGDPWTDSDALTPSGVMISMEEPGWYSFGFEIKDKKCDVPCIGIEMVHDGGKKTWHSAATAIYCLMGSGQLLWDTVTGVDMAL

SEQ ID NO: 122 - protein, 435 aa, Artificial Sequence
  Description of Artificial Sequence: Synthetic polypeptide
LYSDILLKFSSTEITAPTMPLNCANASNVQAVNHSATKGVTLPLPEPEWTYPRLSCPGSTFQKALLISPHRFGETKGNSAPLIIREPFIACGPKECKHFALTHYAAQPGGYYNGTREDRNKLRHLISVKLGKIPTVENSIFHMAAWSGSACHDGREWTYIGVDGPDSNALLKIKYGEAYTDTYHSYANNILRTQESACNCIGGDCYLMITDGSASGVSECRFLKIREGRIIKEIFPTGRVEHTEECTCGFASNKTIECACRDNSYTAKRPFVKLNVETDTAEIRLMCTETYLDTPRPDDGSITGPCESNGDKGSGGIKGGFVHQRMASKIGRWYSRTMSKNKRMGMGLYVKYDGDPWIDSDALTLSGVMVSMEEPGWYSFGFEIKDKKCDVPCIGIEMVHDGGKETWHSAATAIYCLMGSGQLLWDTVTGVNMAL

SEQ ID NO: 123 - protein, 435 aa, Artificial Sequence
  Description of Artificial Sequence: Synthetic polypeptide
LYSDILLKFSTTEITAPTMPLDCANASNVQAVNHSAAKGVTLLLPEPEWTYPRLSCPGSTFQKALLISPHRFGETKGNSAPLIIREPFIACGPKECKHFALTHYAAQPGGYYNGTREDRNKLRHLISVKLGKIPTVENSIFHMAAWSGSACHDGKEWTYIGVDGPDSNALLKIKYGEAYTDTYHSYAHNILRTQESACNCIGGNCYLMITDGSASGISECRFLKIREGRIIKEIFPTGRVKHTEECTCGFANNKTIECACRDNSYTAKRPFVKLNVETDTAEIRLMCTETYLDTPRPDDGSITGPCESNGNKGSGGIKGGFVHQRMASKIGRWYSRTMSKTKRMGMGLYVKYDGDPWTDSDALVFSGVMISVEEPGWYSFGFEIKDKKCDVPCIGIEMVHDGGKETWHSAATAIYCLMGSGQLLWDTVTGVNMTL

SEQ ID NO: 124 - protein, 435 aa, Artificial Sequence
  Description of Artificial Sequence: Synthetic polypeptide
LYSDILLKFSRTEITAPILRLACANASNVQAVNRSATKGVTLLLPEPEWTYPRLSCPGSTFQKALLISPHRFGETKGNSAPLIIREPFIACGPKECKHFALTHYAAQPGGYYNGTREDRNKLRHLISVKLGKIPTVENSIFHMAAWSGSACHDGREWTYIGVDGPDSNALLKIKYGGAFTDTYHSYAKNILSPQESACNCIGGDCYLMITDGPASGISECRFLKIREGRIIKEIFPTGRVKHTEECTCGFASNKTIECACRDNSYTAKRPFVKLNVETDTAEIRLMCTETYLDTPRPNDGSITGPCESNGDKGSGGIKGGFVHQRMASKIGRWYSRTMSKTKRMGMGLYVKYDGDPWTDSEALALSGVMVSMEEPGWYSFGFEIKDKKCDVPCIGIEMVHDGGKTTWHSAATAIYCLMGSGQLLWDTVTGVNMTL

SEQ ID NO: 125 - protein, 435 aa, Artificial Sequence
  Description of Artificial Sequence: Synthetic polypeptide
LYSDILLKFSRTEITAPIMPLDCANASNVQAVNRSATKGVTLLLPEPEWTYPRLSCPGSTFQKALLISPHRFGETKGNSAPLIIREPFIACGPKECKHFALTHYAAQPGGYYNGTREDRNKLRHLISVKLGKIPTVENSIFHMAAWSGSACHDGREWTYIGVDGPDSNALLKIKFGEAYTDTYHSYAKNILGTQESACNCIGGDCNLMITDGPASGISESRFLKIGEGRIIKEIFPTGRVKHTEECTCGFASNKTIECACRDNSYTAKRPFVKLNVETDTAEIRLMCTETYLDTPRPNDGSITGPCESNGDKGSGGIKGGFVHQRMASKIGRWYSRTMSKTERMGMGLYVKYDGDPWADSDALAFSGVMVSMKEPGWYSFGFEIKDKKCDVPCIGIEMVHDGGKETWHSAATAIYCLMGSGQLLWDTVTGVNMAL

SEQ ID NO: 126 - protein, 435 aa, Artificial Sequence
  Description of Artificial Sequence: Synthetic polypeptide
LYSDILLKFSPTEITAPTMPLDCANTSNVQAVNRSATKGVTLLLPEPEWTYPRLSCPGSTFQKALLISPHRFGETKGNSAPLIIREPFIACGPNECKHFALTHYAAQPGGYYNGTRGDRNKLRHLISVKLGKIPTVENSIFHMAAWSGSACHDGKEWTYIGVDGPDNNALLKITYGEAYPGTYHSYAIKNPRTQESAPNCFGGHSFPIITHAPPSGVWEPRFLKIREGRIINEIFPTGRVKPPEECTCGFASNNTIECACRDNNCTAKRPFVKFHVESDPAEIRAMCTDTYLDSPRPDDGSITGPCDSNGDKGSGGIKGGFVHQRMESKIGRWYSRTMSKTERMGMGLYVKYDGDPWADSDALANSGVMVSMNEPGSSSFGFEIKDKKCDVPCIGIEMVHDGGKETWHSAATAIYCLMGSGQLLWDTVTGVDMAL

SEQ ID NO: 127 - protein, 435 aa, Artificial Sequence
  Description of Artificial Sequence: Synthetic polypeptide
LYSDILLKFSPTEITAPTMPLDCANASNVQAVNRSATKGVTLFLPEPEWTYPRLSCPGSTFQKALLISPHRFGETKGNSAPLIIREPFIACGPTECKHFALTHYAAQPGGYYNGTREDRNKLRHLISVKLGKIPTVENSIFHMAAWSGSACHDGKEWTYIGVDGPDSNALLKIKYGEAYTDTYHFYAKNILRTQESACSCIGGDCYLMITDGPASGVSECRFLKIREGRIIKEIFPTGRVKHTEECTCGFASNKTIECACRDNSYTAKRPFVKLNVETDTAEIRLMCTETYLDTPRPNDGSITGPCESDGDKGSGGIKGGFVHQRMASKIGRWYSRTMSKTKRMGMGLYVKYDGDPWTDSEALALSGVMVSMEEPGWYSFGFEIKDKKCDVPCIGIEMVHDGGKTTWHSAATAIYCLMGSGQLLWDTVTGVDMAL

SEQ ID NO: 128 - protein, 585 aa, Artificial Sequence
  Description of Artificial Sequence: Synthetic polypeptide
MKAIIVLLMVVTSNADRICTGITSSNSPHVVKTATQGEVNVTGVIPLTTTPTKSHFANLKGTETRGKLCPKCLNCTDLDVALGRPKCTGKIPSARVSILHEVRPVTSGCFPIMHDRTKIRQLPNLLRGYEHIRLSTHNVINAENAPGGPYKIGTSGSCPNITNGNGFFATMAWAVPKNDKNKTATNPLTIEVPYICTEGEDQITVWGFHSDNETQMAKLYGDSKPQKFTSSANGVTTHYVSQIGGFPNQTEDGGLPQSGRIVVDYMVQKSGKTGTITYQRGILLPQKVWCASGRSKVIKGSLPLIGEADCLHEKYGGLNKSKPYYTGEHAKAIGNCPIWVKTPLKLANGTKYRPPAKLLKERGFFGAIAGFLEGGWEGMIAGWHGYTSHGAHGVAVAADLKSTQEAINKITKNLNSLSELEVKNLQRLSGAMDELHNEILELDEKVDDLRADTISSQIELAVLLSNEGIINSEDEHLLALERKLKKMLGPSAVEIGNGCFETKHKCNQTCLDRIAAGTFDAGEFSLPTFDSLNITAASLNDDGLDNHTILLYYSTAASSLAVTLMIAIFVVYMVSRDNVSCSICL

SEQ ID NO: 129 - protein, 585 aa, Artificial Sequence
  Description of Artificial Sequence: Synthetic polypeptide
MKAIIVLLMVVTSNADRICTGITSSNSPHVVKTATQGEVNVTGVIPLTTTPTKSHFANLKGTETRGKLCPKCLNCTDLDVALGRPKCTGNIPSARVSILHEVRPVTSGCFPIMHDRTKIRQLPNLLRGYEHIRLSTHNVINAENAPGGPYKIGTSGSCPNVTNGNGFFATMAWAVPKNDNNKTATNSLTIEVPYICTEGEDQITVWGFHSDNEIQMAKLYGDSKPQKFTSSANGVTTHYVSQIGGFPNQTEDGGLPQSGRIVVDYMVQKSGKTGTITYQRGILLPQKVWCASGRSKVIKGSLPLIGEADCLHEKYGGLNKSKPYYTGEHAKAIGNCPIWVKTPLKLANGTKYRPPAKLLKERGFFGAIAGFLEGGWEGMIAGWHGYTSHGAHGVAVAADLKSTQEAINKITKNLNSLSELEVKNLQRLSGAMDELHNEILELDEKVDDLRADTISSQIELAVLLSNEGIINSEDEHLLALERKLKKMLGPSAVEIGNGCFETKHKCNQTCLDRIAAGTFDAGEFSLPTFDSLNITAASLNDDGLDNHTILLYYSTAASSLAVTLMIAIFVVYMVSRDNVSCSICL

SEQ ID NO: 130 - protein, 582 aa, Artificial Sequence
  Description of Artificial Sequence: Synthetic polypeptide
MKAIIVLLMVVTSNADRICTGITSSNSPHVVKTATQGEVNVTGVIPLTTTPTKSHFANLKGTKTRGKLCPNCLNCTDLDVALGRPMCMGTIPSAKASILHEVRPVTSGCFPIMHDRTKIRQLPNLLRGYENIRLSTHNVINAERAPGGPYRLGTSGSCPNVTSRNGFFATMAWAVPRDNKTATNPLTVEVPYICTKGEDQITVWGFHSDDKTQMKNLYGDSNPQKFTSSANGVTTHYVSQIGDFPNQTEDGGLPQSGRIVVDYMVQKPGKTGTIVYQRGVLLPQKVWCASGRSKVIKGSLPLIGEADCLHEKYGGLNKSKPYYTGEHAKAIGNCPIWVKTPLKLANGTKYRPPAKLLKERGFFGAIAGFLEGGWEGMIAGWHGYTSHGAHGVAVAADLKSTQEAINKITKNLNSLSELEVKNLQRLSGAMDELHNEILELDEKVDDLRADTISSQIELAVLLSNEGIINSEDEHLLALERKLKKMLGPSAVDIGNGCFETKHKCNQTCLDRIAAGTFNAGEFSLPTFDSLNITAASLNDDGLDNHTILLYYSTAASSLAVTLMIAIFIVYMVSRDNVSCSIC

SEQ ID NO: 131 - protein, 584 aa, Artificial Sequence
  Description of Artificial Sequence: Synthetic polypeptide
MKAIIILLMVVTSNADRICTGITSSNSPHVVKTATQGEVNVTGVIPLTTTPTKSYFANLKGTKTRGKLCPDCLNCTDLDVALGRPMCVGTTPSAKASILHEVRPVTSGCFPIMHDRTKIRQLANLLRGYENIRLSTQNVIDAEKAPGGPYRLGTSGSCPNATSKSGFFATMAWAVPKDNNKNATNPLTVEVPYICAEGEDQITVWGFHSDNKTQMKNLYGDSNPQKFTSSANGVTTHYVSQIGGFPDQTEDGGLPQSGRIVVDYMMQKPGKTGTIVYQRGVLLPQKVWCASGRSKVIKGSLPLIGEADCLHEKYGGLNKSKPYYTGEHAKAIGNCPIWVKTPLKLANGTKYRPPAKLLKERGFFGAIAGFLEGGWEGMIAGWHGYTSHGAHGVAVAADLKSTQEAINKITKNLNSLSELEVKNLQRLSGAMDELHNEILELDEKVDDLRADTISSQIELAVLLSNEGIINSEDEHLLALERKLKKMLGPSAVDIGNGCFETKHKCNQTCLDRIAAGTFNAGEFSLPTFDSLNITAASLNDDGLDNHTILLYYSTAASSLAVTLMLAIFIVYMVSRDNVSCSICL

SEQ ID NO: 132 - protein, 584 aa, Artificial Sequence
  Description of Artificial Sequence: Synthetic polypeptide
MKAIIVLLMVVTSNADRICTGITSSNSPHVVKTATQGEVNVTGVIPLTTTPTKSYFANLKGTRTRGKLCPDCLNCTDLDVALGRPMCVGTTPSAKASILHEVRPVTSGCFPIMHDRTKIRQLPNLLRGYEKIRLSTQNVIDAEKAPGGPYRLGTSGSCPNATSKIGFFATMAWAVPKDNYKNATNPLTVEVPYICTEGEDQITVWGFHSDNKTQMKSLYGDSNPQKFTSSANGVTTHYVSQIGDFPDQTEDGGLPQSGRIVVDYMMQKPGKTGTIVYQRGVLLPQKVWCASGRSKVIKGSLPLIGEADCLHEEYGGLNKSKPYYTGKHAKAIGNCPIWVKTPLKLANGTKYRPPAKLLKERGFFGAIAGFLEGGWEGMIAGWHGYTSHGAHGVAVAADLKSTQEAINKITKNLNSLSELEVKNLQRLSGAMDELHNEILELDEKVDDLRADTISSQIELAVLLSNEGIINSEDEHLLALERKLKKMLGPSAVDIGNGCFETKHKCNQTCLDRIAAGTFNAGEFSLPTFDSLNITAASLNDDGLDNHTILLYYSTAASSLAVTLMLAIFIVYMVSRDNVSCSICL

SEQ ID NO: 133 - protein, 564 aa, Artificial Sequence
  Description of Artificial Sequence: Synthetic polypeptide
MELIVLLILLNPYTFVLGDRICIGYQANQNNQTVNTLLEQNVPVTGAQEILETNHNGKLCSLNGVPPLDLQSCTLAGWLLGNPNCDSLLEAEEWSYIKINESAPDDLCFPGNFENLQDLLLEMSGVQNFTKVKLFNPQSMTGVTTNNVDQTCPFEGKPSFYRNLNWIQGNSGLPFNIEIKNPTSNPLLLLWGIHNTKDAAQQRNLYGNDYSYTIFNFGEKSEEFRPEIGQRDEVKAHQDRIDYYWGSLPAQSTLRIESTGNLIAPEYGFYYKRKEGKGGLMKSKLPISDCSTKCQTPLGALNSTLPFQNVHQQTIGNCPKYVKATSLMLATGLRNNPQMEGRGLFGAIAGFIEGGWQGMIDGWYGYHHENQEGSGYAADKEATQKAVDAITNKVNSIIDKMNSQFESNIKEFNRLELRIQHLSDRVDDALLDIWSYNTELLVLLENERTLDFHDANVKNLFEKVKAQLKDNAIDEGNGCFLLLHKCNNSCMDDIKNGTYKYMDYREESHIEKQKIDGVKLTDYSRYYIMTLYSTIASSVVLGSLIIAAFLWGCQKGSIQCKICI

SEQ ID NO: 134 - protein, 561 aa, Artificial Sequence
  Description of Artificial Sequence: Synthetic polypeptide
MITILILVLPIVVGDQICIGYHSNNSTQTVNTLLESNVPVTSSHSILEKEHNGLLCKLKGKAPLDLIDCSLPAWLMGNPKCDELLTASEWAYIKEDPEPENGICFPGDFDSLEDLILLVSNTDHFRKEKIIDMTRFSDVTTNNVDSACPYDTNGASFYRNLNWVQQNKGKQLIFHYQNSENNPLLIIWGVHQTSNAAEQNTYYGSQTGSTTITIGEETNTYPLVISESSILNGHSDRINYFWGVVNPNQNFSIVSTGNFIWPEYGYFFQKTTNISGIIKSSEKISDCDTICQTKIGAINSTLPFQNIHQNAIGDCPKYVKAQELVLATGLRNNPIKETRGLFGAIAGFIEGGWQGLIDGWYGYHHQNSEGSGYAADKEATQKAVDAITTKVNNIIDKMNTQFESTAKEFNKIEMRIKHLSDRVDDGFLDVWSYNAELLVLLENERTLDFHDANVNNLYQKVKVQLKDNAIDMGNGCFKILHKCNNTCMDDIKNGTYNYYEYRKESHLEKQKIDGVKLSENSSYKIMIIYSTVASSVVLGLIILAAIEWGCFKGNLQCRICI

SEQ ID NO: 135 - protein, 566 aa, Artificial Sequence
  Description of Artificial Sequence: Synthetic polypeptide
MKAILVVLLYTFATANADTLCIGYHANNSTDTVDTVLEKNVTVTHSVNLLEDKHNGKLCKLRGVAPLHLGKCNIAGWILGNPECESLSTASSWSYIVETPSSDNGTCYPGDFIDYEELREQLSSVSSFERFEIFPKTSSWPNHDSNKGVTAACPHAGAKSFYKNLIWLVKKGNSYPKLSKSYINDKGKEVLVLWGIHHPSTSADQQSLYQNADAYVFVGSSRYSKKFKPEIAIRPKVRDREGRMNYYWTLVEPGDKITFEATGNLVVPRYAFAMERNAGSGIIISDTPVHDCNTTCQTPKGAINTSLPFQNIHPITIGKCPKYVKSTKLRLATGLRNIPSIQSRGLFGAIAGFIEGGWTGMVDGWYGYHHQNEQGSGYAADLKSTQNAIDEITNKVNSVIEKMNTQFTAVGKEFNHLEKRIENLNKKVDDGFLDIWTYNAELLVLLENERTLDYHDSNVKNLYEKVRSQLKNNAKEIGNGCFEFYHKCDNTCMESVKNGTYDYPKYSEEAKLNREEIDGVKLESTRIYQILAIYSTVASSLVLVVSLGAISFWMCSNGSLQCRICI

SEQ ID NO: 136 - protein, 566 aa, Artificial Sequence
  Description of Artificial Sequence: Synthetic polypeptide
MKAKLLVLLCAFTATYADTICIGYHANNSTDTVDTVLEKNVTVTHSVNLLEDSHNGKLCRLKGIAPLQLGNCSVAGWILGNPKCESLFSKESWSYIAETPNPENGTCYPGYFADYEELREQLSSVSSFERFEIFPKESSWPNHTVTKGVTTSCSHNGKSSFYRNLLWLTEKNGLYPNLSKSYVNNKEKEVLVLWGVHHPSNIRDQRAIYHTENAYVSVVSSHYSRRFTPEIAKRPKVRGQEGRINYYWTLLEPGDTIIFEANGNLIAPWYAFALSRGFGSGIITSNASMDECDAKCQTPQGAINSSLPFQNVHPVTIGECPKYVRSTKLRMVTGLRNIPSIQSRGLFGAIAGFIEGGWTGMIDGWYGYHHQNEQGSGYAADQKSTQNAINGITNKVNSVIEKMNTQFTAVGKEFNKLERRMENLNKKVDDGFLDIWTYNAELLVLLENGRTLDFHDSNVKNLYEKVKSQLKNNAKEIGNGCFEFYHKCNNECMESVKNGTYDYPKYSEESKLNRGKIDGVKLESMGVYQILAIYSTVASSLVLLVSLGAISFWMCSNGSLQCRICI

SEQ ID NO: 137 - protein, 566 aa, Artificial Sequence
  Description of Artificial Sequence: Synthetic polypeptide
MKAILLVLLCTFAATNADTLCIGYHANNSTDTVDTVLEKNVTVTHSVNLLEDRHNGKLCKLGGIAPLHLGKCNIAGWLLGNPECELLLTVSSWSYIVETSNSDNGTCYPGDFINYEELREQLSSVSSFERFEIFPKTSSWPNHETNRGVTAACPYAGANSFYRNLIWLVEKGNSYPKLSKSYVNNKGKEVLVLWGIHHPPTSTDQQSLYQNADAYVFVGSSKYNRKFKPEIAARPKVRGQAGRMNYYWTLIEPGDTITFEATGNLVVPRYAFAMNRGSGSGIIISDAPVHDCNTKCQTPKGAINTSLPFQNIHPVTIGECPKYVKSTKLRMATGLRNIPSIQSRGLFGAIAGFIEGGWTGMIDGWYGYHHQNEQGSGYAADQRSTQNAIDGITNKVNSVIEKMNTQFTAVGKEFNHLEKRIENLNKKVDDGFLDIWTYNAELLVLLENERTLDFHDSNVKNLYEKVRSQLRNNAKEIGNGCFEFYHKCDDTCMESVKNGTYDYPKYSEESKLNREEIDGVKLESTRIYQILAIYSTVASSLVLLVSLGAISFWMCSNGSLQCRICI

SEQ ID NO: 138 - protein, 520 aa, Artificial Sequence
  Description of Artificial Sequence: Synthetic polypeptide
MKATILVVLCIFTASNEDTICIGYHANNSTDTVDTVLEKNVTVTHSVNLLEDSHNGKLCKLKGIAPLQLGKCNIAGWLLGNPECDLLLTASSWSYIVETSNSENGTCYPGDFIDYEELREQLSSVSSFEKFEIFPKTSSWPNHETTKGVTAACSYAGASSFYRNLLWLTKKGSSYPKLSKSYVNNKGKEVLVLWGVHHPPTGTDQQSLYQNADAYVSVGSSKYNRRFTPEIAARPKVRDQAGRMNYYWTLLEPGDTITFEATGNLIAPWYAFALNRGSGSGIITSDAPVHDCNTKCQTPHGAINSSLPFQNIHPVTIGECPKYVRSTKLRMATGLRNIPSIQSRGLFGAIAGFIEGGWTGMIDGWYGYHHQNEQGSGYAADRKSTQNAIDGITNKVNSVIEKMNTQFTSVGKEFNHLEKRIENLNRKVDDGFLDVWTYNAELLVLLENERTLDYHDSNVKNLYEKVRSQLKNNAKEIGNGCFEFYHKCDDSCMESVKNGTYDYPKYSEESKLNREEIDGV

SEQ ID NO: 139 - protein, 565 aa, Artificial Sequence
  Description of Artificial Sequence: Synthetic polypeptide
MKANLLVLLCALAAADADTICIGYHANNSTDTVDTVLEKNVTVTHSVNLLEDSHNGKLCRLKGIAPLQLGKCNIAGWLLGNPECDPLLPVRSWSYIVETPNSENGICYPGDFIDYEELREQLSSVSSFERFEIFPKESSWPNHNTNGVTAACSHEGKSSFYRNLLWLTEKEGSYPKLKNSYVNKKGKEVLVLWGIHHPPNSKEQQNLYQNENAYVSVVTSNYNRRFTPEIAERPKVRDQAGRMNYYWTLLKPGDTIIFEANGNLIAPMYAFALSRGFGSGIITSNASMHECNTKCQTPLGAINSSLPYQNIHPVTIGECPKYVRSAKLRMVTGLRNIPSIQSRGLFGAIAGFIEGGWTGMIDGWYGYHHQNEQGSGYAADQKSTQNAINGITNKVNTVIEKMNIQFTAVGKEFNKLEKRMENLNKKVDDGFLDIWTYNAELLVLLENERTLDFHDSNVKNLYEKVKSQLKNNAKEIGNGCFEFYHKCDNECMESVRNGTYDYPKYSEESKLNREKVDGVKLESMGIYQILAIYSTVASSLVLLVSLGAISFWMCSNGSLQCRICI

SEQ ID NO: 140 - protein, 565 aa, Artificial Sequence
  Description of Artificial Sequence: Synthetic polypeptide
MKAKLLVLLCTFTATYADTICIGYHANNSTDTVDTVLEKNVTVTHSVNLLEDSHNGKLCLLKGIAPLQLGNCSVAGWILGNPECESLISKESWSYIVETPNPENGTCYPGYFADYEELREQLSSVSSFERFEIFPKESSWPNHTVTGVTASCSHNGKSSFYRNLLWLTEKNGLYPNLSNSYVNNKEKEVLVLWGVHHPSNIRDQRAIYHTENAYVSVVSSHYSRRFTPEIAKRPKVRGQEGRINYYWTLLEPGDTIIFEANGNLIAPWYAFALSRGFGSGIITSNAPMNECDAKCQTPQGAINSSLPFQNVHPVTIGECPKYVRSTKLRMVTGLRNIPSIQSRGLFGAIAGFIEGGWTGMMDGWYGYHHQNEQGSGYAADQKSTQNAINGITNKVNSVIEKMNTQFTAVGKEFNKLERRMENLNKKVDDGFLDIWTYNAELLVLLENERTLDFHDSNVKNLYEKVKSQLKNNAKEIGNGCFEFYHKCNNECMESVKNGTYDYPKYSEESKLNREKIDGVKLESMGVYQILAIYSTVASSLVLLVSLGAISFWMCSNGSLQCRICI

SEQ ID NO: 141 - protein, 565 aa, Artificial Sequence
  Description of Artificial Sequence: Synthetic polypeptide
MKVKLLVLLCTFTATYADTICIGYHANNSTDTVDTVLEKNVTVTHSVNLLEDSHNGKLCLLKGIAPLQLGNCSVAGWILGNPECELLISRESWSYIVEKPNPENGTCYPGHFADYEELREQLSSVSSFERFEIFPKESSWPNHTTTGVSASCSHNGESSFYKNLLWLTGKNGLYPNLSKSYANNKEKEVLVLWGVHHPPNIGDQRALYHKENAYVSVVSSHYSRKFTPEIAKRPKVRDQEGRINYYWTLLEPGDTIIFEANGNLIAPRYAFALSRGFGSGIINSNAPMDECDAKCQTPQGAINSSLPFQNVHPVTIGECPKYVRSAKLRMVTGLRNIPSIQSRGLFGAIAGFIEGGWTGMVDGWYGYHHQNEQGSGYAADQKSTQNAINGITNKVNSVIEKMNTQFTAVGKEFNKLERRMENLNKKVDDGFIDIWTYNAELLVLLENERTLDFHDSNVKNLYEKVKSQLKNNAKEIGNGCFEFYHKCNDECMESVKNGTYDYPKYSEESKLNREKIDGVKLESMGVYQILAIYSTVASSLVLLVSLGAISFWMCSNGSLQCRICI

SEQ ID NO: 142 - protein, 565 aa, Artificial Sequence
  Description of Artificial Sequence: Synthetic polypeptide
MKAKLLVLLYAFVATDADTICIGYHANNSTDTVDTIFEKNVAVTHSVNLLEDRHNGKLCKLKGIAPLQLGKCNIIGWLLGNPECDSLLPARSWSYIVETPNSENGACYPGDFIDYEELREQLSSVSSLERFEIFPKESSWPNHTFNGVTASCSHRGKSSFYRNLLWLTKKGDSYPKLTNSYVNNKGKEVLVLWGVHHPSSSDEQQSLYSNGNAYVSVASSNYNRRFTPEIAARPKVKDQHGRMNYYWTLLEPGDTIIFEATGNLIAPWYAFALSRGFESGIITSNASMHECNTKCQTPQGSINSNLPFQNIHPVTIGECPKYVRSTKLRMVTGLRNIPSIQYRGLFGAIAGFIEGGWTGMIDGWYGYHHQNEQGSGYAADQKSTQNAINGITNKVNSIIEKMNTQFTAVGKEFNNLEKRMENLNKKVDDGFLDIWTYNAELLVLLENGRTLDFHDLNVKNLYEKVKSQLKNNAKEIGNGCFEFYHKCDNECMESVRNGTYDYPKYSEESKLNREKIDGVKLESMGVYQILAIYSTVASSLVLLVSLGAISFWMCSNGSLQCRICI

SEQ ID NO: 143 - protein, 565 aa, Artificial Sequence
  Description of Artificial Sequence: Synthetic polypeptide
MKVKLLVLLCTFTATYADTICIGYHANNSTDTVDTVLEKNVTVTHSVNLLENSHNGKLCLLKGIAPLQLGNCSVAGWILGNPECELLISKESWSYIVEKPNPENGTCYPGHFADYEELREQLSSVSSFERFEIFPKESSWPNHTVTGVSASCSHNGESSFYRNLLWLTGKNGLYPNLSKSYANNKEKEVLVLWGVHHPPNIGDQKALYHTENAYVSVVSSHYSRKFTPEIAKRPKVRDQEGRINYYWTLLEPGDTIIFEANGNLIAPRYAFALSRGFGSGIINSNAPMDKCDAKCQTPQGAINSSLPFQNVHPVTIGECPKYVRSAKLRMVTGLRNIPSIQSRGLFGAIAGFIEGGWTGMVDGWYGYHHQNEQGSGYAADQKSTQNAINGITNKVNSVIEKMNTQFTAVGKEFNKLERRMENLNKKVDDGFIDIWTYNAELLVLLENERTLDFHDSNVKNLYEKVKSQLKNNAKEIGNGCFEFYHKCNDECMESVKNGTYDYPKYSEESKLNREKIDGVKLESMGVYQILAIYSTVASSLVLLVSLGAISFWMCSNGSLQCRICI

SEQ ID NO: 144 - protein, 566 aa, Artificial Sequence
  Description of Artificial Sequence: Synthetic polypeptide
MEAKLFVLFCVFNALKADTICVGYHANNSTDTVDTILEKNVTVTHSVNLLENSHNGKLCSLNGKAPLQLGNCNVAGWILGNPECDLLLTANSWSYIIETSNSKNGKCYPGEFADYEELREQLSTVSSFERFEIFPKATSWPNHETTKGTTTACSHSGASSFYRNLLWIVKKGNSYPKLSKSYTNNKGKEVLVIWGVHHPPTNSDQQTLYQNAYTYVSVESSKYYRRFTPEIAARPKVRGQAGRMNYYWTLLDQGDTITFEATGNLIAPWYAFALNKGSNSGIMMSDAHVHNCTTKCQTPHGALKSNLPFQNVHPITIGECPKYVKSTQLRMATGLRNVPSIQSRGLFGAIAGFIEGGWTGMIDGWYGYHHQNEQGSGYAADQKSTQIAIDGISNKVNSVIEKMNIQFTSVGKEFNNLEKRIENLNKKVDDGFLDIWTYNAELLILLENERTLDFHDFNVKNLYEKVKSQLRNNAKEVGNGCFEFYHKCDNECMESVKNGTYNYPKYSEESKLNREEIDGVKLESMGVHQILAIYSTVASSLVLLVSLGAISFWMCSNGSLQCRICI

SEQ ID NO: 145 - protein, 566 aa, Artificial Sequence
  Description of Artificial Sequence: Synthetic polypeptide
MKAKLLVLLCALSATDADTICIGYHANNSTDTVDTVLEKNVTVTHSVNLLEDSHNGKLCRLKGIAPLQLGKCNIAGWILGNPECESLFSKKSWSYIAETPNSENGTCYPGYFADYEELREQLSSVSSFERFEIFPKERSWPKHNVTRGVTASCSHKGKSSFYRNLLWLTEKNGSYPNLSKSYVNNKEKEVLVLWGVHHPSNIEDQKTIYRKENAYVSVVSSNYNRRFTPEIAERPKVRGQAGRINYYWTLLEPGDTIIFEANGNLIAPWHAFALNRGFGSGIITSNASMDECDTKCQTPQGAINSSLPFQNIHPVTIGECPKYVRSTKLRMVTGLRNIPSIQSRGLFGAIAGFIEGGWTGMIDGWYGYHHQNEQGSGYAADQKSTQNAINGITNKVNSVIEKMNTQFTAVGKEFNKLEKRMENLNKKVDDGFLDIWTYNAELLVLLENERTLDFHDSNVKNLYEKVKSQLKNNAKEIGNGCFEFYHKCNNECMESVKNGTYDYPKYSEESKLNREKIDGVKLESMGVYQILAIYSTVASSLVLLVSLGAISFWMCSNGSLQCRICI

SEQ ID NO: 146 - protein, 566 aa, Artificial Sequence
  Description of Artificial Sequence: Synthetic polypeptide
MKAKLLVLLCAFTATDADTICIGYHANNSTDTVDTVLEKNVTVTHSVNLLEDSHNGKLCRLKGIAPLQLGNCSIAGWILGNPECESLFSKKSWSYIAETPNSENGTCYPGYFADYEELREQLSSVSSFERFEIFPKESSWPNHTVTKGVTASCSHKGKSSFYRNLLWLTEKNGSYPTLSKSYVNNKEKEVLVLWGVHHPSNIGDQRAIYHTENAYVSVVSSHYNRRFTPEIAKRPKVRGQEGRINYYWTLLEPGDTIIFEANGNLIAPWYAFALSRGFGSGIITSNASMDECDAKCQTPQGAINSSLPFQNVHPVTIGECPKYVRSTKLRMVTGLRNIPSIQSRGLFGAIAGFIEGGWTGMIDGWYGYHHQNEQGSGYAADQKSTQNAINGITNKVNSVIEKMNTQFTAVGKEFNKLERRMENLNKKVDDGFLDIWTYNAELLVLLENERTLDFHDSNVKNLYEKVKSQLKNNAKEIGNGCFEFYHKCNNECMESVKNGTYDYPKYSEESKLNREKIDGVKLESMGVYQILAIYSTVASSLVLLVSLGAISFWMCSNGSLQCRICI

SEQ ID NO: 147 - protein, 566 aa, Artificial Sequence
  Description of Artificial Sequence: Synthetic polypeptide
MEARLFVLFCTFTVLKADIICVGYHANNSTDTVDTVLEKNVTVTHSVNLLESSHNGKLCSLNGIPPLQLGKCNVAGWLLGNPECDQLLTANSWSYIIETSNSENGTCYPGEFIDYEELREQLSSVSSFEKFEIFPKASSWPNHETTKGVTAACPYLGNSNFYRNLLWITKKGNSYPELSKSYTNNKGKEVLILWGVHHPPSTNEQQNLYQNANAYVSVGSSKYNRRFTPEIAARPKVRGQAGRMNYYWTLLDQGDTITFEATGNLIAPWYAFALNKNSDSGIMMSDAPVHNCDTKCQTPHGALNSSLPFQNVHPITIGECPKYIKSTKLRMATGLRNVPSIQSRGLFGAIAGFIEGGWTGMIDGWYGYHHQNEQGSGYAADQKSTQNAIDGITNKVNSVIEKMNTQFTAVGKEFNNLEKRIENLNKKVDDGFLDVWTYNAELLVLLENERTLDFHDSNVRNLYEKVKSQLRNNAKEIGNGCFEFYHKCDDECMESVKNGTYDYPKYSEESKLNREEIDGVKLESMGVYQILAIYSTVASSLVLLVSLGAISFWMCSNGSLQCRVCI

SEQ ID NO: 148 - protein, 562 aa, Artificial Sequence
  Description of Artificial Sequence: Synthetic polypeptide
MAIIYLILLFTAVRGDQICIGYHANNSTEKVDTILERNVTVTHAKDILEKTHNGKLCKLNGIPPLELGDCSIAGWLLGNPECDRLLSVPEWSYIMEKENPRDGLCYPGSFNDYEELKHLLSSVKHFEKVKILPKDRWTQHTTTGGSRACAVSGNPSFFRNMVWLTKKGSNYPVAQGSYNNTSGEQMLIIWGVHHPNDETEQRTLYQNVGTYVSVGTSTLNKRSTPEIATRPKVNGQGGRMEFSWTLLDMWDTINFESTGNLIAPEYGFKISKRGSSGIMKTEGTLENCETKCQTPLGAINTTLPFHNVHPLTIGECPKYVKSEKLVLATGLRNVPQIESRGLFGAIAGFIEGGWQGMVDGWYGYHHSNDQGSGYAADKESTQKAFDGITNKVNSVIEKMNTQFEAVGKEFSNLERRLENLNKKMEDGFLDVWTYNAELLVLMENERTLDFHDSNVKNLYDKVRMQLRDNVKELGNGCFEFYHKCDDECMNSVKNGTYDYPKYEEESKLNRNEIKGVKLSSMGVYQILAIYATVAGSLSLAIMMAGISFWMCSNGSLQCRICI

SEQ ID NO: 149 - protein, 566 aa, Artificial Sequence
  Description of Artificial Sequence: Synthetic polypeptide
MKTIIALSYILCLVFAQKLPGNDNSTATLCLGHHAVPNGTIVKTITNDQIEVTNATELVQSSSTGGICDSPHQILDGENCTLIDALLGDPQCDGFQNKKWDLFVERSKAYSNCYPYDVPDYASLRSLVASSGTLEFNNESFNWAGVTQNGTSSACKRRSNKSFFSRLNWLTHLKYKYPALNVTMPNNEKFDKLYIWGVHHPGTDSDQISLYAQASGRITVSTKRSQQTVIPNIGSRPRVRDVSSRISIYWTIVKPGDILLINSTGNLIAPRGYFKIRSGKSSIMRSDAPIGKCNSECITPNGSIPNDKPFQNVNRITYGACPRYVKQNTLKLATGMRNVPEKQTRGIFGAIAGFIENGWEGMVDGWYGFRHQNSEGTGQAADLKSTQAAINQINGKLNRLIGKTNEKFHQIEKEFSEVEGRIQDLEKYVEDTKIDLWSYNAELLVALENQHTIDLTDSEMNKLFERTKKQLRENAEDMGNGCFKIYHKCDNACIESIRNGTYDHDVYRDEALNNRFQIKGVELKSGYKDWILWISFAISCFLLCVALLGFIMWACQKGNIRCNICI

SEQ ID NO: 150 - protein, 566 aa, Artificial Sequence; identical to SEQ ID NO: 149
  Description of Artificial Sequence: Synthetic polypeptide

SEQ ID NO: 151 - protein, 488 aa, Artificial Sequence
  Description of Artificial Sequence: Synthetic polypeptide
MKTIIALSYILCLVFAQKLPGNDNSTATLCLGHHAVPNGTIVKTITNDQIEVTNATELVQSSSTGGICDSPHQILDGENCTLIDALLGDPQCDGFQNKKWDLFVERSKAYSNCYPYDVPDYASLRSLVASSGTLEFNNESFNWTGVTQNGTSSACKRRSNKSFFSRLNWLTHLKYKYPALNVTMPNNEKFDKLYIWGVLHPGTDSDQIRLYAQASGRITVSTKRSQQTVIPNIGSRPRVRDVSSRISIYWTIVKPGDILLINSTGNLIAPRGYFKIRSGKSSIMRSDAPIGKCNSECITPNGSIPNDKPFQNVNRITYGACPRYIKQNTLKLATGMRNVPEKQTRGIFGAIAGFIENGWEGMVDGWYGFRHQNSEGTGQAADLKSTQAAINQINGKLNRLIGKTNEKFHQIEKEFSEVEGRIQDLEKYVEDTKIDLWSYNAELLVALENQYTIDLTDSEMNKLFERTKKQLRENAEDMGNGCFKIYHK

SEQ ID NO: 152 - protein, 566 aa, Artificial Sequence
  Description of Artificial Sequence: Synthetic polypeptide
MKTIIALSHILCLVFAQKLPGNDNSTATLCLGHHAVPNGTIVKTITNDQIEVTNATELVQNSSIGEICDSPHQILDGENCTLIDALLGDPQCDGFQNKKWDLFVERSKAYSNCYPYDVPDYASLRSLVASSGTLEFNNESFNWTGVTQNGTSSACIRRSNNSFFSRLNWLTQLNFKYPALNVTMPNNEQFDKLYIWGVHHPVTDKDQIFLYAQSSGRITVSTKRSQQAVIPNIGYRPRIRNIPSRISIYWTIVKPGDILLINSTGNLIAPRGYFKIRSGKSSIMRSDAPIGKCNSECITPNGSIPNDKPFQNVNRITYGACPRYVKQSTLKLATGMRNVPEKQTRGIFGAIAGFIENGWEGMVDGWYGFRHQNSEGRGQAADLKSTQAAIDQINGKLNRLIGKTNEKFHQIEKEFSEVEGRIQDLEKYVEDTKIDLWSYNAELLVALENQHTIDLTDSEMNKLFEKTKKQLRENAEDMGNGCFKIYHKCDNACIGSIRNGTYDHDVYRDEALNNRFQIKGVELKSGYKDWILWISFAISCFLLCVALLGFIMWACQKGNIRCNICI

SEQ ID NO: 153 - protein, 566 aa, Artificial Sequence
  Description of Artificial Sequence: Synthetic polypeptide
MKTIIALSYILCLVFAQKLPENDNSTATLCLGHHAVPNGTIVKTITSDRIEVTNATELVQNSSIGEICDSPHQILDGKNCTLIDALLGDPQCDGFQNKKWDLFVERSKAYSNCYPYDVPDYASLRSLVASSGTLEFNDESFNWAGVTQNGTSSACIRGSNSSFFSRLNWLTHSNFKYPALNVTMPNNEQFDKLYIWGVHHPGTDKDQIFLYAQSSGRITVSTKRSQQAVIPNIGSRPRIRNIPSRISIYWTIVKPGDILLINSTGNLIAPRGYFKIRSGKSSIMRSDAPIGKCKSECITPNGSIPNDKPFQNVNRITYGACPRYVKQSTLKLATGMRNVPEKQTRGIFGAIAGFIENGWEGMKDGWYGFRHQNSEGRGQAADLKSTQAAIDQINGKLNRLIGKTNEKFHQIEKEFSEVEGRIQDLEKYVEDTKIDLWSYNAELLVALENQHTIDLTDSEMNKLFEKTKKQLRENAEDMGNGCFKIYHKCDNACIGSIRNGTYDHDVYRDEALNNRFQIKGVELKSGYKDWILWISFAISCFLLCVALLGFIMWACQKGNIRCNICI

SEQ ID NO: 154 - protein, 566 aa, Artificial Sequence
  Description of Artificial Sequence: Synthetic polypeptide
MKTIIALSYILCLVFAQKLPGNDNSTATLCLGHHAVPNGTIVKTITNDQIEVTNATELVQSSSTGGICDSPHQILDGENCTLIDALLGDPQCDGFQNKKWDLFVERSKAYSNCYPYDVPDYASLRSLVASSGTLEFNNESFNWTGVTQNGTSSSCKRRSNNSFFSRLNWLTHLKFKYPALNVTMPNNEKFDKLYIWGVHHPGTNNDQISLYTQASGRITVSTKRSQQTVIPNIGSRPRVRDIPSRISIYWTIVKPGDILLINSTGNLIAPRGYFKIRSGKSSIMRSDAPIGKCNSECITPNGSIPNDKPFQNVNRITYGACPRYVKQNTLKLATGMRNVPEKQTRGIFGAIAGFIENGWEGMVDGWYGFRHQNSEGIGQAADLKSTQAAINQINGKLNRLIGKTNEKFHQIEKEFSEVEGRIQDLEKYVEDTKIDLWSYNAELLVALENQHTIDLTDSEMNKLFERTKKQLRENAEDMGNGCFKIYHKCDNACIGSIRNGTYDHDVYRDEALNNRFQIKGVELKSGYKDWILWISFAISCFLLCVALLGFIMWACQKGNIRCNICI

SEQ ID NO: 155 - protein, 566 aa, Artificial Sequence
  Description of Artificial Sequence: Synthetic polypeptide
MKTIIALSYILCLVFAQKIPGNDNSTATLCLGHHAVPNGTLVKTITNDQIEVTNATELVQSSSTGRICDSPHRILDGENCTLIDALLGDPHCDGFQNKEWDLFVERSKAYSNCYPYDVPDYASLRSLVASSGTLEFNNESFNWTGVAQNGTSYACKRSSIKSFFSRLNWLHQLKYKYPALNVTMPNNDKFDKLYIWGVHHPSTDSDQTSIYAQASGRVTVSTKRSQQTVIPNIGSRPWVRGISSRISIHWTIVKPGDILLINSTGNLIAPRGYFKIRSGKSSIMRSDAPIGKCNSECITPNGSIPNDKPFQNVNRITYGACPRYVKQNTLKLATGMRNVPEKQTRGIFGAIAGFIENGWEGMVDGWYGFRHQNSEGTGQAADLKSTQAAINQINGKLNRLIEKTNEKFHQIEKEFSEVEGRIQDLEKYVEDTKIDLWSYNAELLVALENQHTIDLTDSEMNKLFERTRKQLRENAEDMGNGCFKIYHKCDNACIGSIRNGTYDHDVYRDEALNNRFQIKGVELKSGYKDWILWISFAISCFLLCVVLLGFIMWACQKGNIRCNICI

SEQ ID NO: 156 - protein, 566 aa, Artificial Sequence
  Description of Artificial Sequence: Synthetic polypeptide
MKTIIALSYILCLVFAQKLPGNDNSTATLCLGHHAVPNGTLVKTITNDQIEVTNATELVQSSSTGRICDSPHRILDGKNCTLIDALLGDPHCDGFQNKEWDLFVERSKAYSNCYPYDVPDYASLRSLVASSGTLEFTNEGFNWTGVAQDGTSYACKRGSVKSFFSRLNWLHKLEYKYPALNVTMPNNDKFDKLYIWGVHHPSTDSVQTSLYVQASGRVTVSTKRSQQTVIPNIGSRPWVRGISSRISIYWTIVKPGDILLINSTGNLIAPRGYFKIRSGKSSIMRSDAPIGNCNSECITPNGSIPNDKPFQNVNRITYGACPRYVKQNTLKLATGMRNVPEKQTRGIFGAIAGFIENGWEGMVDGWYGFRHQNSEGTGQAADLKSTQAAINQINGKLNRLIEKTNEKFHQIEKEFSEVEGRIQDLEKYVEDTKIDLWSYNAELLVALENQHTIDLTDSEMNKLFERTRKQLRENAEDMGNGCFKIYHKCDNACIGSIRNGTYDHDVYRDEALNNRFQIKGVELKSGYKDWILWISFAISCFLLCVVLLGFIMWACQKGNIRCNICI

SEQ ID NO: 157 - protein, 566 aa, Artificial Sequence
  Description of Artificial Sequence: Synthetic polypeptide
MKTIIALSYILCLVFAQKLPGNDNSTATLCLGHHAVPNGTIVKTITNDQIEVTNATELVQNSSIGEICDSPHQILDGENCTLIDALLGDPQCDGFQNKKWDLFVERSKAYSNCYPYDVPDYASLRSLVASSGTLEFNNESFNWTGVTQNGTSSACIRRSNNSFFSRLNWLTHLNFKYPALNVTMPNNEQFDKLYIWGVHHPGTDKDQIFLYAQSSGRITVSTKRSQQAVIPNIGSRPRIRNIPSRISIYWTIVKPGDILLINSTGNLIAPRGYFKIRSGKSSIMRSDAPISKCKSECITPNGSIPNDKPFQNVNRITYGACPRYVKQSTLKLATGMRNVPEKQTRGIFGAIAGFIENGWEGMVDGWYGFRHQNSEGRGQAADLKSTQAAIDQINGKLNRLIGKTNEKFHQIEKEFSEVEGRIQDLEKYVEDTKIDLWSYNAELLVALENQHTIDLTDSEMNKLFEKTKKQLRENAEDMGNGCFKIYHKCDNACIGSIRNGTYDHDVYRDEALNNRFQIKGVELKSGYKDWILWISFAISCFLLCVALLGFIMWACQKGNIRCNICI

SEQ ID NO: 158 - protein, 566 aa, Artificial Sequence
  Description of Artificial Sequence: Synthetic polypeptide
MKTIIALSYILCLVFAQKLPGNDNSTATLCLGHHAVPNGTIVKTITNDQIEVTNATELVQSSSTGEICDSPHQILDGKNCTLIDALLGDPQCDGFQNKKWDLFVERSKAYSNCYPYDVPDYASLRSLVASSGTLEFNNESFNWTGVTQNGTSSACIRRSKNSFFSRLNWLTHLNFKYPALNVTMPNNEQFDKLYIWGVHHPGTDKDQIFLYAQASGRITVSTKRSQQTVSPNIGSRPRVRNIPSRISIYWTIVKPGDILLINSTGNLIAPRGYFKIRSGKSSIMRSDAPIGKCNSECITPNGSIPNDKPFQNVNRITYGACPRYVKQNTLKLATGMRNVPEKQTRGIFGAIAGFIENGWEGMVDGWYGFRHQNSEGRGQAADLKSTQAAIDQINGKLNRLIGKTNEKFHQIEKEFSEVEGRIQDLEKYVEDTKIDLWSYNAELLVALENQHTIDLTDSEMNKLFEKTKKQLRENAEDMGNGCFKIYHKCDNACIGSIRNGTYDHDVYRDEALNNRFQIKGVELKSGYKDWILWISFAISCFLLCVALLGFIMWACQKGNIRCNICI

SEQ ID NO: 159 - protein, 566 aa, Artificial Sequence
  Description of Artificial Sequence: Synthetic polypeptide
MKTIIALSYILCLVFTQKLPGNDNSTATLCLGHHAVPNGTIVKTITNDQIEVTNATELVQSSSTGEICDSPHQILDGENCTLIDALLGDPQCDGFQNKKWDLFVERSKAYSNCYPYDVPDYASLRSLVASSGTLEFNNESFNWTGVTQNGTSSACIRRSNNSFFSRLNWLTHLKFKYPALNVTMPNNEKFDKLYIWGVHHPGTDNDQIFPYAQASGRITVSTKRSQQTVIPNIGSRPRVRNIPSRISIYWTIVKPGDILLINSTGNLIAPRGYFKIRSGKSSIMRSDAPIGKCNSECITPNGSIPNDKPFQNVNRITYGACPRYVKQNTLKLATGMRNVPEKQTRGIFGAIAGFIENGWEGMVDGWYGFRHQNSEGIGQAADLKSTQAAIDQINGKLNRLIGKTNEKFHQIEKEFSEVEGRIQDLEKYVEDTKIDLWSYNAELLVALENQHTIDLTDSEMNKLFEKTKKQLRENAEDMGNGCFKIYHKCDNACIGSIRNGTYDHDVYRDEALNNRFQIKGVELKSGYKDWILWISFAISCFLLCVALLGFIMWACQKGNIRCNICI

SEQ ID NO: 160 - protein, 566 aa, Artificial Sequence
  Description of Artificial Sequence: Synthetic polypeptide
MKTIIALSYIFCLALGQDLPGNDNSTATLCLGHHAVPNGTLVKTITDDQIEVTNATELVQSSSTGKICNNPHRILDGIDCTLIDALLGDPHCDVFQNETWDLFVERSKAFSNCYPYDVPDYASLRSLVASSGTLEFITEGFTWTGVTQNGGSNACKRGPGSGFFSRLNWLTKSGSTYPVLNVTMPNNDNFDKLYIWGVHHPSTNQEQTSLYVQASGRVTVSTRRSQQTIIPNIGSRPWVRGLSSRISIYWTIVKPGDVLVINSNGNLIAPRGYFKMRTGKSSIMRSDAPIDTCISECITPNGSIPNDKPFQNVNKITYGACPKYVKQNTLKLATGMRNVPEKQTRGLFGAIAGFIENGWEGMIDGWYGFRHQNSEGTGQAADLKSTQAAIDQINGKLNRVIEKTNEKFHQIEKEFSEVEGRIQDLEKYVEDTKIDLWSYNAELLVALENQHTIDLTDSEMNKLFEKTRRQLRENAEDMGNGCFKIYHKCDNACIESIRNGTYDHDVYRDEALNNRFQIKGVELKSGYKDWILWISFAISCFLLCVVLLGFIMWACQRGNIRCNICI

SEQ ID NO: 161 - protein, 566 aa, Artificial Sequence
  Description of Artificial Sequence: Synthetic polypeptide
MKTIIALSYILCLVFAQKLPGNDNSTATLCLGHHAVPNGTLVKTITNDQIEVTNATELVQSSSTGRICDSPHQILDGENCTLIDALLGDPHCDGFQNKEWDLFVERSKAYSNCYPYDVPDYASLRSLVASSGTLEFNNESFNWTGVAQNGTSSACKRRSIKSFFSRLNWLHQLENRYPALNVTMPNNDKFDKLYIWGVHHPSTDSVQTSVYVQASGRVTVSTKRSQQTVIPNIGSRPWVRGVSSRISIYWTIVKPGDILLINSTGNLIAPRGYFKIRSGKSSIMRSDAPIGKCNSECITPNGSIPNDKPFQNVNRITYGACPRYVKQNTLKLATGMRNVPEKQTRGIFGAIAGFIENGWEGMMDGWYGFRHQNSEGTGQAADLKSTQAAINQINGKLNRLIEKTNEKFHQIEKEFSEVEGRIQDLEKYVEDTKIDLWSYNAELLVALENQHTIDLTDSEMNKLFERTRKQLRENAEDMGNGCFKIYHKCDNACIGSIRNGTYDHDVYRDEALNNRFQIKGVELKSGYKDWILWISFAISCFLLCVVLLGFIMWACQKGNIRCNICI

SEQ ID NO: 162 - protein, 567 aa, Artificial Sequence
  Description of Artificial Sequence: Synthetic polypeptide
MEKIVLLLAIVSLVKSDQICIGYHANNSTEQVDTIMERNVTVTHAQDILEKTHNGKLCNLDGVKPLILRDCSVAGWLLGNPMCDEFLNVPEWSYIVEKINPANDLCYPGNFNDYEELKHLLSRINHFEKIQIIPKNSWSDHEASGVSSACPYQGRSSFFRNVVWLTQKDNAYPTIKRSYNNTNQEDLLVLWGIHHPNDAAEQTRLYQNPTTYISVGTSTLNQRLIPKIATRSKVNGQSGRMEFFWTILKSNDAINFESNGNFIAPENAYKIVKKGDSTIMKSELEYGNCNTKCQTPIGAINSSMPFHNIHPLTIGECPKYVKSNRLVLATGLRNSPQGERRRKKRGLFGAIAGFIEGGWQGMVDGWYGYHHSNEQGSGYAADKESTQKAIDGVTNKVNSIIDKMNTQFEAVGREFNNLERRIENLNKKMEDGFLDVWTYNAELLVLMENERTLDFHDSNVKNLYDKVRLQLRDNAKELGNGCFEFYHRCDNECMESVRNGTYDYPQYSEEARLKREEISGVKLESIGTYQILSIYSTVASSLALAIMVAGLFLWMCSNGSLQCRICI

SEQ ID NO: 163 - protein, 569 aa, Artificial Sequence
  Description of Artificial Sequence: Synthetic polypeptide
MEKIVLLLAMIGLVKSDQICIGYHANNSTEQVDTIMEKNVTVTHAQDILEKTHNGKLCNLDGVKPLILKDCSVAGWLLGNPMCDEFLNVSEWSYIVEKASPANGLCYPGDFNDYEELKHLLSRINHLKKIKIIPKSYWSNHEASSGVSAACSYLGEPSFFRNVVWLIKKNNTYPPIKVNYTNTNQEDLLVLWGIHHPNDEKEQIRIYQNPNTSISVGTSTLNQRLVPKIATRPKVNGQSGRMEFFWTILKPNDSINFDSNGNFIAPEYAYKIAKKGDSVIMKSELEYGNCNTKCQTPMGAINSSMPFHNIHPLTIGECPKYVKSNRLVLATGLRNAPQREGGRRRKRGLFGAIAGFIEGGWQGMVDGWYGYHHSNEQGSGYAADKESTQKAIDGITNKVNSIIDKMNTQFEIVGREFNNLERRIENLNKKMEDGFLDVWTYNAELLVLMENERTLDFHDSNVKNLYEKVRLQLRDNAKELGNGCFEFYHKCDNECMESVRNGTYDYPQYSEEARLSREEISGVKMESMVTYQILSIYSTVASSLALAIMVAGLSLWMCSNGSLQCRICI

SEQ ID NO: 164 - protein, 565 aa, Artificial Sequence
  Description of Artificial Sequence: Synthetic polypeptide
MEKIVLLFAIVSLVKSDQICIGYHANNSTEQVDTIMEKNVTVTHAQDILEKTHNGKLCDLDGVKPLILRDCSVAGWLLGNPMCDEFINVPEWSYIVEKANPVNDLCYPGDFNDYEELKHLLSRINHFEKIQIIPKSSWSSHEASLGVSSACPYQGKSSFFRNVVWLIKKNSTYPTIKRSYNNTNQEDLLVLWGIHHPNDAAEQTKLYQNPTTYISVGTSTLNQRLVPRIATRSKVNGQSGRMEFFWTILKPNDAINFESNGNFIAPEYAYKIVKKGDSTIMKSELEYGNCNTKCQTPMGAINSSMPFHNIHPLTIGECPKYVKSNRLVLATGLRNSPQRERRRKKRGLFGAIAGFIEGGWQGMVDGWYGYHHSNEQGSGYAADKESTQKAIDGVTNKVNSIIDKMNTQFEAVGREFNNLERRIENLNKKMEDGFLDVWTYNAELLVLMENERTLDFHDSNVKNLYDKVRLQLRDNAKELGNGCFEFYHKCDNECMESVRNGTYDYPQYSEEARLKREEISGVKLESIGIYQILSIYSTVASSLALAIMVAGLSLWMCSNGSLQCR

SEQ ID NO: 165 - protein, 568 aa, Artificial Sequence
  Description of Artificial Sequence: Synthetic polypeptide
MEKIVLLFAIISLVKSDHICIGYHANNSTEQVDTIMEKNVTVTHAQDILEKTHNGKLCDLNGVKPLILKDCSVAGWLLGNPMCDEFIDVPEWSYIVEKANPANDLCYPGNFNDYEELKHLLSRINHFEKIRIIPKDSWPDHEASLGVSAACSYQGNSSFFRNVVWLLKKDNAYPIIKKSYNNTNKEDLLVLWGIHHPNDEAEQTRLYQNPTTYVSIGTSTLNQRLVPRIATRSKVNGQSGRIDFFWTILKPNDAINFESNGNFIAPEYAYKIVKKGDSTIMRSEVEYGNCSTRCQTPMGAINSSMPFHNIHPLTIGECPKYVKSNKLVLATGLRNSPQIERRRRKRGLFGAIAGFIEGGWQGMVDGWYGYHHSNEQGSGYAADKESTQKAIDGVTNKVNSIIDKMNTQFEAVGREFNNLERRIENLNKKMEDGFLDVWTYNAELLVLMENERTLDFHDSNVKNLYDKVRLQLRDNAKELGNGCFEFYHKCDNECMESVRNGTYDYPQYSEEARLKREEISGVKLESIGTYQILSIYSTVASSLVLAIMVAGLSLWMCSNGSLQCRICI

SEQ ID NO: 166 - protein, 568 aa, Artificial Sequence
  Description of Artificial Sequence: Synthetic polypeptide
MEKIVLLLATVSLVKSDQICIGYHANNSTEQVDTIMEKNVTVTHAQDILERTHNGKLCDLNGVKPLILRDCSVAGWLLGNPMCDEFINVPEWSYIVEKASPANDLCYPGNFNDYEELKHLLSRISHFEKIQIIPKSSWSNHDASSGVSSACPYLGKSSFFRNVVWLIKKNSTYPTIKRSYNNTNQEDLLVLWGIHHPNDAAEQTKLYQNPTTYISVGTSTLNQRLVPEIATRPKVNGQSGRIEFFWTILKPNDAINFESNGNFIAPEYAYKIVKKGDSTIMKSELEYGNCNTKCQTPMGAINSSMPFHNIHPLTIGECPKYVKSNRLVLATGLRNAPQRERRRKKRGLFGAIAGFIEGGWQGMVDGWYGYHHSNEQGSGYAADQESTQKAIDGVTNKVNSIINKMNTQFEAVGREFNNLERRIENLNKKMEDGFLDVWTYNAELLVLMENERTLDFHDSNVKNLYDKVRLQLRDNAKELGNGCFEFYHKCDNECMESVKNGTYDYPQYSEEARLNREEISGVKLESMGTYQILSLYSTVASSLALAIMVAGLSLWMCSNGSLQCRICI

SEQ ID NO: 167 - protein, 566 aa, Artificial Sequence
  Description of Artificial Sequence: Synthetic polypeptide
MIAIIVIAILAAAGKSDKICIGYHANNSTTQVDTILEKNVTVTHSVELLENQKEERFCKILNKAPLDLRGCTIEGWILGNPQCDLLLGDQSWSYIVERPNAQYGICYPGVLNEVEELKALIGAGERVERFEMFPKSTWAGVDTSSGVTRACPYNSGSSFYRNLLWIIKTKSAAYPVIRGTYNNTGKQPILYFWGVHHPPDINEQNTLYGSGDRYVRMGTENMNFAKSPEIAARPAVNGQRGRIDYYWSVLKPGETLNVESNGNLIAPWYAYKFVSTNNKGAIFKSNLPIENCDATCQTIAGALRTNKTFQNVSPLWIGECPKYVKSESLRLATGLRNVPQIETRGLFGAIAGFIEGGWTGMIDGWYGYHHENSQGSGYAADRESTQKAIDGITNKVNSIIDKMNTQFEAVDHEFSNLERRIDNLNKRMEDGFLDVWTYNAELLVLLENERTLDLHDANVKNLYEKVKSQLRDNANDLGNGCFEFWHKCDNECIESVKNGTYDYPKYQDESKLNRQEIESVKLENLGVYQILAIYSTVSSSLVLVGLIIAMGLWMCSNGSMQCRICI

SEQ ID NO: 168 - protein, 566 aa, Artificial Sequence
  Description of Artificial Sequence: Synthetic polypeptide
MIAFIVIAILVTTGKSDKICIGYHANNSTTKVDTILEKNVTVTHSVELLENQKEERFCKISNKAPLDLRDCTLEGWILGNPRCGILLADQSWSYIVERPNARNGICYPGTLNEVEELKALIGSGERVERFEMFPKSTWAGVDTNSGVSSACPLGNGPSFYRNLLWIIKHTTSGYPVIKGTYTNTGDKSVLYFWGVHHPPDTTEQNVLYGSGNRYVRMGTESMNFARSPEVAARPAVNGQRGRIDYFWSILKPGETLNVESNGNLIAPWYAYRFVNKDSKGAIFRSNLPIENCDATCQTTEGVIRTNKTFQNVSPLWIGECPKYVKSKSLRLATGLRNVPQIETRGLFGDIAGFIEGGWTGMIDGWYGYHHENSQGSGYAADRESTQKAIDGITNKVNSIIDKMNTQFEAVGHEFSNLERRIDNLNKRMEDGFLDVWTYNAELLVLLENERTLDLHDANVKNLHERVKSQLRDNANDLGNGCFEFWHKCDNECMESVKNGTYNYPKYQAESRLNKQKIESVKLEEFGVYQILAIYSTVSSSLVLVGLIMAMGLWMCSNGSMQCRICI

SEQ ID NO: 169 - protein, 570 aa, Artificial Sequence
  Description of Artificial Sequence: Synthetic polypeptide
MNTQILILAISAFLCVRADKICLGHHAVSNGTKVDTLTEKGIEVVNATETVEQKNIPKICSKGKQTIDLGQCGLLGTTIGPPQCDQFLEFSANLIIERREGDDICYPGKFDNEETLRQILRKSGGIKKENMGFTYTGVRTNGETSACRRSRSSFYAEMKWLLSNTDNGVFPQMTKSYKNTKREPALIIWGIHHSGSTAEQTRLYGSGNKLVTVWSSKYQQSFAPSPGPKPQINGQSGRIDFYWLMLDPNDTVTFSFNGAFIAPDRASFLRGKSLGIQSDAQLDNNCEGECYHIGGTIISNLPFQNINSRAIGKCPRYVKQKSLMLATGMKNVPENSIHKQLTHHMRKKRGLFGAIAGFIENGWEGLIDGWYGYRHQNAQGEGTAADYKSTQSAINQITGKLNRLIEKTNQQFELIDNEFNEIEKQIGNVINWTRDSIIEVWSYNAEFLVAVENQHTIDLTDSEMNKLYEKVRRQLRENAEEDGNGCFEIFHQCDNDCMASIRNNTYDHKKYRKEAIQNRIQIDAVKLSSGYKDIILWFSFGASCFLFLAIAMVLAFICIKNGNMRCTICI

SEQ ID NO: 170 - protein, 569 aa, Artificial Sequence
  Description of Artificial Sequence: Synthetic polypeptide
SKSRGYKMNTQILVFALVASIPTNADKICLGHHAVSNGTKVNTLTERGVEVVNATETVERTNVPRICSKGKRTVDLGQCGLLGTITGPPQCDQFLEFSADLIIERREGSDVCYPGKFVNEEALRQILRESGGIDKETMGFTYSGIRTNGTTSACRRSGSSFYAEMKWLLSNTDNAAFPQMTKSYKNTRKDPALIIWGIHHSGSTTEQTKLYGSGNKLITVGSSNYQQSFVPSPGARPQVNGQSGRIDFHWLILNPNDTVTFSFNGAFIAPDRASFLRGKSMGIQSEVQVDANCEGDCYHSGGTIISNLPFQNINSRAVGKCPRYVKQESLLLATGMKNVPEIPKRRRRGLFGAIAGFIENGWEGLIDGWYGFRHQNAQGEGTAADYKSTQSAIDQITGKLNRLIEKTNQQFELIDNEFTEVERQIGNVINWTRDSMTEVWSYNAELLVAMENQHTIDLADSEMNKLYERVKRQLRENAEEDGTGCFEIFHKCDDDCMASIRNNTYDHSKYREEAIQNRIQIDPVKLSSGYKDVILWFSFGASCFILLAIAMGLVFICVKNGNMRCTICI

SEQ ID NO: 171 - protein, 549 aa, Artificial Sequence
  Description of Artificial Sequence: Synthetic polypeptide
TQILVFALIAIIPTNADKICLGHHAVSNGTKVNTLTERGVEVVNATETVERTNIPRICSKGKRTVDLGQCGLLGTITGPPQCDQFLEFSADLIIERREGSDVCYPGKFVNEEALRQILRESGGIDKEAMGFTYSGIRTNGATSACRRSGSSFYAEMKWLLSNTDNAAFPQMTKSYKNTRKSPALIVWGIHHSVSTAEQTKLYGSGNKLVTVGSSNYQQSFVPSPGARPPVNGLSGRIDFHWLMLNPNDTVTFSFNGAFIAPDRASFLRGKSMGIQSGVQVDANCEGDCYHSGGTIISNLPFQNIDSRAVGKCPRYVKQRSLLLATGMKNVPEIPKGRGLFGAIAGFIENGWEGLIDGWYGFRHQNAQGEGTAADYKSTQSAIDQITGKLNRLIEKTNQQFELIDNEFNEVEKQIGNVINWTRDSITEVWSYNAELLVAMENQHTIDLADSEMDKLYERVKRQLRENAEEDGTGCFEIFHKCDDDCMASIRNNTYDHSKYREEAMQNRIQIDPVKLSSGYKDVILWFSFGASCFILLAIVMGLVFICVKN

SEQ ID NO: 172 - protein, 851 aa, Artificial Sequence
  Description of Artificial Sequence: Synthetic polypeptide
MRVMETQRSYQHLWRWGTMILGMLIIYSAAENLWVTVYYGVPVWKDAETTLFCASDAKAYETEKHNVWATHACVPTDPNPQEIHLENVTEDFNMWKNNMVEQMHTDIISLWDQSLKPCVKLTPLCVTLNCSNVNNTQEVKNCTFNMTTELRDKRQKVSSLFYKLDIVPIEEGQGNSSNSSYEEYRLINCNTSAITQACPKVTFEPIPIHYCTPAGFAILKCKDEEFNGTGPCRNVSTVQCTHGIKPVVSTQLLLNGSLAKNKVIIRSENITNNVKTIIVQLAEPVIINCTRPNNNTRESVRIGPGQTFYTSNIIGDIRQAHCNVSKSAWNKTLHVVGEQLEKYFVNKTIKFDRPTGGDLEITTHSFNCGGEFFYCNTSELFNSTWNSSTQGTNNTELNDTITLPCRIKQVINMWQRVGQAMYAPPIKGIIKCVSNITGLILTRDGGINSTNGTETFRPGGGDMRDNWRSELYKYKVVQIEPLGVAPTKARRRTVGREKRAIGLGAVFLGFLGAAGSTMGAASITLTVQARQLLSGIVQQQSNLLRAIEAQQQMLRLTVWGIKQLQARVLAVERYLRDQQLLGIWGCSGKLICTTNVPWNSSWSNKTQEEIWGNMTWLQWDKEISNYTEIIYNLIEKSQNQQEKNEKDLLALDKWATLWSWFDITKWLWYIKIFIMIVGGLIGLRIVFAVLSVINRVRQGYSPLSFQTHTPNPRGLDRPGGIEEEGGEQDRTRSIRLVSGFLALAWDDLRSLCLFSYHRLRDFVWIAKRTVELLGHSSLKGLRLGWEGLKYLWNLLVYWGLELKKSAINLFDTIAIVVAGWTDRIIEIGQGIGRGILHIPRRIRQGLENFLL

SEQ ID NO: 173 - protein, 856 aa, Artificial Sequence
  Description of Artificial Sequence: Synthetic polypeptide
MRVTGIQKNCQSLWRWGTMILGMLMICSVVGNLWVTVYYGVPVWKEADTTLFCASNARAYDTEVHNVWATHACVPTDPNPQEIDLENVTEEFNMWKNNMVEQMHTDIISLWDQFLKPCVKLTPLCVTLDCGYNVTNLTSTSNMKEDITNCSYNMTTEIRDRKQKVYSLFYRLDIVPIDEEKNNNSVTSPYRLINCNTSAITQACPKVSFEPIPIYYCAPAGFAILKCKDAEFNGTGPCKNVSTVQCTHGIRPVISTQLLLNGSLAENGTKIRSENITNNAKTIIVQLNETVQINCTRPNNNTRRSVRIGPGQAFYATGGITGDIRRAYCNVSRQKWEQALKGVVIQLRKHFNNKTITFTNSSGGDVEITTHSFNCGGEFFYCNTSGLFNSTWDNNTDPTNTTSNDTITLQCRIKQFINMWQRTGQAMYAPPIQGVIRCDSNITGLLLTRDGGVGNNTTETFRPGGGDMRDNWRSELYKYKVVKIEPLGVAPTGAKRRVVEREKRAVGIGAVFIGFLGAAGSTMGAASVTLTVQARQLLSGIVQQQSNLLRAIEAQQHLLKLTVWGIKQLQARVLAVERYLRDQQLLGIWGCSGKLICTTNVPWNSSWSNKSQEEIWGNMTWLQWDKEISKYTQTIYDLFEESQNQQEKNEQDLLALDKWANLWTWFDITNWLWYIKIFIMIVGGLIGLRIVFSVLSVINRVRQGYSPLSFQTLTPSPRGLDRLGRIEEEGGERDRDRSIRLVSGFLALAWDDLRNLCLFSYHRLRDFILIAARTVELLGHNSLKGLRLGWEGLKYLWNLLIYWGRELKFSAINLIDTIAIAVAGWTDRIIEAGQRLCRAILNIPRRIRQGAERAWL

SEQ ID NO: 174 - protein, 855 aa, Artificial Sequence
  Description of Artificial Sequence: Synthetic polypeptide
MRVMGTQRNCQHLLRWGTMILGMIIICSAAENLWVTVYYGVPVWKNAETTLFCASDAKAYETEKHNVWATHACVPTDPNPQEIHLENVTEEFNMWKNNMVEQMHTDIISLWDQSLKPCVKLTPLCVTLNCSNVNVTATSGTTHGGRGRMKNCSYNITTELRDRRQKVYSLFYRLDVVPINENNSSNNEYRLINCNTSAITQACPKVTFEPIPIHYCAPAGFAILKCKDKKFNGTGPCTNVSTVQCTHGIKPVVSTQLLLNGSLAEGEVMIRSENITNNAKNIIVQFAEPVKINCTRPNNNTRMSIRIGPGQAFYATGDIIGNIRQAHCNVSRAEWNTTLQKVVTKLREYFGNNKTIKFANSSGGDLEITTHSFNCGGEFFYCNSSGLFNSTWTNMQESNSTESNDTITLPCRIKIINMWQRAGQAMYAPPIQGIIKCVSNITGLILTRDGGDNNSESETFRPGGGDMRDNWRSELYKYKVVKIEPLGVAPTKAKRRVVEREKRAVGIGAVFLGFLGAAGSTMGAASITLTVQARQLLSGIVQQQSNLLRAIEAQQHLLKLTVWGIKQLQARVLAVERYLRDQQLLGIWGCSGKIICTTNVPWNSSWSNKSQSEIWENMTWLQWDKEISNYTDIIYNLLEESQNQQEKNEQDLLALDKWANLWNWFDISNWLWYIKIFIMIVGGLIGLRIVFTVLSIINRVRQGYSPLSFQTHTPAPRGLDRPERIEEEGGEQDRDRSIRLVTGFLALAWDDLRSLCLFSYHRLRDFILIATETVELLGHSSLRGLRLGWEGLKYLWNLLLYWGQELKISASNLVDTIAIVVAGWTDRVIEIAQGIGRAILHIPRRIRQGFERALL

SEQ ID NO: 175 - protein, 868 aa, Artificial Sequence
  Description of Artificial Sequence: Synthetic polypeptide
MRVMGIQMNCQNLLRWGTMILGMLIICSATSKLWVTVYYGVPVWKDAETTLFCASDAKAYEREVHNVWATHACVPTDPDPQEIYLENVTEGFNMWKNNMVEQMHTDIISLWDQSLKPCVKLTPLCVTLNCSHNITTHNITTNNPNITKYMEGEIKNCSYNMTTELRDKKQKVYSLFYKLDVVPIDKNNGNNNIRTQYRLINCNTSAITQACPKVSFEPIPIHYCAPAGFAILKCNDAEFNGTGPCKNVSTVQCTHGIRPVISTQLLLNGSLAEGRVKIRSENITNNAKTIIVQLNKTVEINCTRPNNNTRKSVRIGPGQAFYATGDIIGDIRQAYCNVSRADWNKTLQGVANQLKSYFSNKTIIFASSSGGDLEITTHSFNCGGEFFYCDTSGLFNSTWGGNSTDSIQESNSTESNDTIILPCRIKQIINMWQRVGQAMYAPPIQGVIKCISNITGLLLTRDGGDNNSANETFRPTGGNMRDNWRSELYKYKVVKIEPLGVAPTPAKRRVVQREKRAVGIGAVFIGFLGAAGSTMGAASITLTVQARQLLSGIVQQQSNLLRAIEAQQHLLKLTVWGIKQLQARVLAVERYLKDQQLLGIWGCSGKLICTTNVPWNSSWSNRTQSEIWNNMTWLQWDKEISNYTDIIYNLIEESQIQQEKNEQELLALDKWANLWNWFDISKWLWYIRIFIMIVGGLIGLRIVFAVLSIINRVRQGYSPLSFQIHTPNPRGPDRPERIEEEGGEQGRDRSIRLVSGFLALAWDDLRSLCLFSYHRLRDFILIAARTVELLKRSSLRGLRLGWEGLKYLWNLLLYWGRELKNSAINLLDTIAIAVAGWTDRVIEIGQAICRAILNIPRRIRQGFERALL

SEQ ID NO: 176 - protein, 848 aa, Artificial Sequence
  Description of Artificial Sequence: Synthetic polypeptide
MRARGMQRNWQHWGRWGILFLLIIYSAAENLWVTVYCGVPVWKDAKTTLFCASDARAYHPEAHNVWATHACVPTDPNPQEIHLENVTEKFNMWKNNMVEQMHEDIISLWDQSLKPCVKLTPLCVTLDCHDLNSSNSSNYTSSNMQGEMTNCSFNMTTELRDKKQKVNAFFYRLDVVQIKENNSTQYRLINCNTSAITQACPKVSFEPIPIHYCAPAGFAILKCNDKKFNGTGPCKNVSTVQCTHGIKPVVSTQLLLNGSLAEEEVVIRSENITNNAKTIIVQLANPVRINCTRPGNNTRKSVRIGPGQTFYATGEIIGDIRQAHCNVNRTEWDSSLQKVATQLRQYFKNTTKIIFTKHSGGDLEITTHSFNCGGEFFYCNTSGLFNSTWDNNNIASSNHTGSNDTITLQCRIKQIINLWQKVGQAMYAPPIPGIIRCESNITGLLLTRDGGNNNSTNETFRPGGGDMRDNWRSELYKYKVVKIEPLGVAPTKAKRRVVARKKRAVGLGAVFLGFLGAAGSTMGAASIALTVQARQLLSGIVQQQSNLLRAIEAQQHMLKLTVWGIKQLQARVLAIERYLKDQQLLGIWGCSGKLICTTNVPWNSGWSNKSQNEIWDKMTWLEWDKEISNYTQLIYTLIEESQNQQEKNEQELLALDKWASLWSWFDISNWLWYIKIFIMVVGGLIGLRIVFAVLSVVRRVRQGYSPLSLQTLIPSPRGPDRPEGIEERGGEQDKDRSIRLVSGFLALAWDDLRSLCLFSYHRLRDFILIAARIVETLGHRGWQGLKYLGNLVQYWSQELKNSAISLLDTIAIAVAEWTDRVIEIGQRICRAILNIPRRIRQGLERALL

SEQ ID NO: 177 - protein, 862 aa, Artificial Sequence
  Description of Artificial Sequence: Synthetic polypeptide
MKVRGTQRNYAPLWKWGTIFLGLIIICKATENLWVTVYYGVPVWRDAETILFCASDAKAYEKEVHNVRDTHACVPTDPNPQEIELENVTEEFNMGKNNMVEQMHTDIISLWDQSLKPCVKLTPICVTLNCHNITTNDTGTGNVTGTGNVTDNNIGEMTNCSFNITTEIRDKRQNVYSLFYKLDVVPINGNGSGNDSEYRLINCNTSTITQACPKVSFEPIPIHYCAPAGFAILKCRDKNFNGTGPCRNVSSVQCTHGIKPVVSTQLLLNGSLAEGDVVIRSENLTNNAKTIIVQLNESVPINCTRPNNNTRKSVRIGPGQALYATDIIGNIRQAHCNISKQNWNTALQKIAAQLRQHFYRTINFTKSSGGDLEITTHSFNCRGEFFYCDTSGLFNSIWNSTAISQNVEESNDTITLPCKIRQIVNMWQRVGQAIYARPIQGIINCTSNITGLLLTRDGGDNDNKTETFRPGGGNMKDNWRSELYRYKVVKIEPLGVAPTKAKRRVVEREKRAVGLGAVIFGFLGAAGSTMGAASITLTAQATQLLSGIVQQQSNLLRAIEAQQHLLKLTVWGIKQLQARVLALERYLRDQQLLGIWGCSGKLICTTTVPWNSSWSNKSQNEIWENMTWQWDKEISNYTDIIYDLIAESQNQQEKNEKDLLALDKWASLWNWFDISKWLWYIKLFIMIVGGLIGLRIVFTVLSIINRVRQGYSPLSFQTHTPSPGGLDRPERIEEEGGDRDRDRSTRLVSGFLALVWDDLRSLCLFSYHRLRDFTLIAARTVELLGHSSLKGLRLGWEGLKYLWNLLSYWGRELKSSAITLLNATAIAVAEGTDRVIEVGQRAGRALLHIPRRIRQGWKRALL

SEQ ID NO: 178 - protein, 880 aa, Artificial Sequence
  Description of Artificial Sequence: Synthetic polypeptide
MRVMGIQKNWQHLWKWGTLILGMIMICSTAGNLWVTVYYGVPVWKDADTTLFCASDAKAYETEKHNVWATHACVPTDPNPQETYLENVTEEFNMWKNNMVEQMHTDIISLWDQSLKPCVKLTPLCVTLHCTDVNVTNTNVTNTNGTSTSSSKVTINDREEIKNCSFNVTTELRDKEKKVYSLFYKLDVVKIDKNKSDYILINCNTSTITQACPKVSFEPIPIHYCAPAGFAILKCRDIDFNGTGPCKNVSTVQCTHGIKPVVSTQLLLNGSLAEGGIRIRFENITNNAKTIIVQLNSSVPINCTRPNNNTRQSVRIGPGQSFFATGEIIGDIRQAHCNVSKSDWHKTLQQVAEQLEKHFKNKTIIFDQPSGGDLEITTHSFNCGGEFFYCNTAGLFNRNWTWSKENGTRMQNKTDSNGTITLQCRIKQIINMWQRTGQAMYAPPIQGVIKCASNITGLLLTRDGGDNKNNSTNSTNQNNTEIFRPIGGDMRNNWRSELYKYKVVKIEPLGVAPTTARRRVVGREKRAVLGGLGAVFLGFLGAAGSTMGAASITLTVQARQLLSGIVQQQSNLLRAIEAQQHLLKLTVWGIKQLQARVLAVERYLRDQQLLGIWGCSGKLICPTNVPWNSSWSNKTMSEIWDNMTWLQWDKEISNYTNIIYNLIEESQNQQEKNEQDLLALDKWASLWNWFDISKWLWYIKIFIMIVGGLIGLRIIFAVFSIINRVRQGYSPLSFQTHPPNPGGLDRPGRIEEEGGEQDRGRSIRLVSGFLALAWDDLRSLCIFSYHRLRDFTLIAERTVELLGHNSLKGLRLGWEGLKYLWNLLVYWGQELKTSAISLFDTLAIVVAGWTDRVIEIGQRLGRGFLHIPRRIRQGLERVLL

SEQ ID NO: 179 - protein, 846 aa, Artificial Sequence
  Description of Artificial Sequence: Synthetic polypeptide
MRVREIPRNCPLLWRWGTMIFWILLICNAEELWVTVFYGVPVWRDAETTLFCASDAKAYDTEVHNIWATHACVPTDPNPQEIGLENVTEEFNMWKNNMVEQMHTDIISLWDQSLKPCVQLTPLCVTLNCSHNISTTNSTSTGNISTINSTSADMRNCSFNMTTELRDKKQNVYSLFYKLDVVQIGNSSSSEYRLINCNISTITQACPKVSFEPIPIHYCAPAGYAILKCREKNFNGTGPCTNVSTVQCTHGIKPVVSTQLLLNGSLAEGDVMIRSENITDNAKTIIVQFNESVMINCTRPNNNTRRSVRIGPGQTFYATGEIIGDIRRAHCNVSGEQWRKALQNVKVQLRKYFNTTIEFANSSGGDLEITTHSFNCRGEFFYCDTTGLFNNTEKNDTIMLPCKIRQIVRMWQRVGQAMYAPPIPGVINCLSNITGLLLTRDGGDSTNNTEKFRPGGGDIRDNWRSELYKYKVVKIEPLGVAPTKAKRRVVERRKRAGLAAVFLGFLGAAGSTMGAASITLTVQARQLLSGIVQQQNNLLKAIEAQQQMLRLTVWGIKQLQARVLALERYLRDQQLLGIWGCSGKLICTTNVPWNSSWSNKTYNSIWDNMTWLQWDKEINNYTNTIYTLIEKAQNQQEKNEQDLLALDKWASLWNWFDITNWLWYIRIFIMIAGGLIGLRIVFAVLSIINRVRKGYSPLSFQTPTPNPGDLDRPERIEEEGGEQGRDRSIRLVSGFLALVWDDLRSLCLFSYHRLRDLVLLTTRAVELLGHNSLKGLRLGWNVLKQLGNLLSYWGQELKNSAINLLDTIAIAVANWTDRVIEIGQRVGRAICNIPRRIRQGLERLLL

SEQ ID NO: 180 - protein, 862 aa, Artificial Sequence
  Description of Artificial Sequence: Synthetic polypeptide
MKVRGIQRNSQHLWRWGTLIFWTIIICSAAEKLWVTVYYGVPVWKDAETTLFCASHANAYEKEQHIVWATHACVPTDPNPLEMDLDNVTEEFNMWKNNMVEQIHDDIIRLWDRSLQPRVKLTPLCVTLDCQPVNSTNNTKVEVPGEMTNCSFNMTTELSDKKQKVRSLFYRIDLVQIGNNTNDSSNRSLQYRLINCNTSTITQACPKVSFEPVPIHYCAPAGFAILKCKDQEFNGTGPCKNVSTVQCTHGIKPVVSTQLLLNGSLAEGGIKIRSANISYNAKNIIVQLDIPVKINCSRPNNNTRTSVRIGPGQTFYATGDIIGNIRQAHCNLSRTAWNDTLYNVSKALREHFPNKTIIFNKSSGGDLEVTQHMFICGGEFFYCNTSGLFNSSWAPNGSWINNIGSRENDTMTLPCRIKQIINMWQRVEQAMYAPPIKGNITCVSNITGLLLTRDGGTNETRENETFRPIGGEMRDNWRSELYKYKVVKIEPLGVAPTKAKRRVVEGREKRAVGMGAFFLGFLGAAGSTMGAASITLTVQARQLLAGIVQQQSNLLKAIEAQQHLLRLTVWGIKQLQARVLAVERYLKDQQLLGIWGCSGKLICTTTVPWNSSWSNKSQDEIWNNMTWMQWDKEINNYTEIIYGLIEESQKQQEKNEFELLELDKWANLWNWFEISNWLWYIKIFIMIVGGLIGLRIVFAVLSIVNRVRQGYSPLSFQTPIPSPEGPDRPGRIEEGGGEQGRTRSIRLVSGFLELAWDDLRSLCLFVYHRSRDFILIAARTVELLGHSSLKGLRLGWEGLKYLWNLLVYWSQELKTSAVSAFNALAITVAEWTDRAIEVGQRIGRAFLNIPRRIRQGFERALL

SEQ ID NO: 181 - protein, 872 aa, Artificial Sequence
  Description of Artificial Sequence: Synthetic polypeptide
MKVKGIQMNSQHLLRWGIMILGLIIICSAAEKLWVNVYYGVPVWKNADTTLFCASDAKAYNPEAHNIWATHACVPTDPSPQEIYLENVTEDFNMWKNNMVEQMHADIISLWDQSLKPCVQLTPLCVTLECKKINITNTTGNNVTANNDTILAREEMRNCSYNMTTELRDKKQKVHSLFYRLDIVEINNNNNGSSNNNSDNDSRPYRLINCNTSAITQACPKISFEPIPIHYCAPAGFAILKCRDKEFNGTGPCKNVSTVQCTHGIKPVVSTQLLLNGSLAEKRVMIRTENITNNAKNIIVQFNESVEINCTRPNNNTRQSVRIGPGQAFYTTEIIGDIRRAYCTVNETKWNQTLYRVAEQLRKYFNNDTTIIFANSSGGDVEITTHSFNCGGEFFYCNTSGLFNSRWENDTQPNNTQPNGTITLPCRIKQIINMWQRTGQAIYAPPIRGVISCQSNITGLLLTRDGGGKNTSDNETFRPGGGDMRDNWRSELYKYKVVKIEPLGVAPNRARRRVVEREKRAVGIGAVFLGFLGAAGSTMGAASMTLTVQARQLLSGIVQQQSNLLRAIEAQQHLLKLTVWGIKQLQARLLAVERYLRDQQLLGIWGCSGKLICATNVPWNSSWSNKSYDEIWGNMTWLQWDKEIDNYTQLIYQLIEDSQNQQEKNEQELLALDKWANLWNWFEISNWLWYIRLFVMIVGGLIGLRIVLAVLSVINRVRQGYSPLSFQTHTPSPGGLDRPRGIEEEGGEQDRGRSIRLVSGFLALAWDDLRSLCLFSYHRLRDFVLIAARIVELLGHNSLKGLRLGWEGLKYLWNLLAYWGRELKNSAINLLDTIAIAVAGWTDRVIELGQRLCRAFLHIPRRIRQGFERALL

SEQ ID NO: 182 - protein, 863 aa, Artificial Sequence
  Description of Artificial Sequence: Synthetic polypeptide
MKVKGTQRNFQHLLRWGIMVLGMIIICSATEQLWVTVYYGVPVWKDAETTLFCASDAKAHETEVHNVWATHACVPTDPNPQEIELKNVTEEFNMWKNNMVEQMHTDIISLWDQSLKPCVKLTPLCVTLNCSNFSVTNNSTNNSTNTTTIDNNMQGEIKNCSYNVTTVIRDEKQKVYSLFYRTDVVEIENNSSQYRLINCNTSAITQACPKVTFEPIPIHYCAPAGFAILKCRNETFNGTGPCNNVSTVQCTHGIRPVVSTQLLLNGSLAEKEIMIRSENISDNAKSILVQLTRPVIINCTRPNNNTRKSIHIGPGQAFYATGDIIGDIRQAYCTVNRTEWNETLHNVTTQLKTYFNKTIVFTSHSGGDLEITTHTFNCGGEFFYCNTSGLFNSTWDDNIKNDTNSTQGSNSTEIILPCKIKQIVRMWQRTGQAMYAPPIPGVIRCVSNITGLILTRDGGNTSSINETFRPGGGDMRDNWRSELYKYKVVKIEPLGVAPTKARRRVVEREKRAVGIGAVLFGFLGAAGSTMGAASITLTVQARQLLAGIVQQQSNLLRAIEAQQQMLRLTVWGIKQLQARVLAVERYLRDQQLLGLWGCSGKLICTTTVPWNSSWSNKSQNEIWNNMTWLQWDKEISNYTQIIYDLIEESQNQQEKNEQDLLALDKWANLWSWFDISSWLWYIRIFIMIVGGLIGLRIVFAVLSIIKRVRQGYSPLSFQIHTPNPGEPDRPGEIEEEGGKQDRSRSIRLVSGFLALAWDDLRSLCLFCYHRLRDFILIAARTVELLGHSSLKGLRLGWEGLKYLWNLLVYWSQELKSSAINLFDTLAITVAGWTDRVIEVGQRLCRALLHIPRRIRQGLERALL

SEQ ID NO: 183 - protein, 854 aa, Artificial Sequence
  Description of Artificial Sequence: Synthetic polypeptide
MRVKGIQMNWQHLWKWGTLILGLGIICNAENLWVTVFYGVPVWKDAETTLFCASDAKAYSEEKHNVWATHACVPTDPDPKEINLVNVTEDFNMWKNKMVEQMQEDIISLWDQSLKPCVKLTPLCVTLECHNSTTPDNNTTQSTIIDETTNCTYNMTTELRDKVQKVHSLFYRLDVVQINGINGTSNNNSAQYRLINCNTSAITQACPKVSFEPIPIHYCAPAGFAILKCRDKEFNGTGPCRNVSSVQCTHGIKPVVSTQLLLNGSLAEEKIMIRSENFTDNGKTIIVQLVEPVKINCTRPSNNTRKGIHIGPGRAFYATGQITGDIRQAHCNISRTEWNKTLHQVAIQLREHFITKNTTIIFNSSSGGDLEITTHSFNCGGEFFYCSTSGLFNSTWENGTQVANDTGSNDTITLPCRIKQIVRMWQRVGQAMYAPPIQGMIRCESNITGLILTRDGVGNNSTNETFRPGGGDMRDNWRSELYKYKVVKIEPLGVAPSRAKRRVVAREKRAVGLGAVFLGFLGAAGSTMGAASLTLTVQARQLLSGIVQQQSNLLRAIEAQHHLLQLTVWGIKQLQARVLALERYLRDQQLLGIWGCSGKLICPTNVPWNYSWSNKSYDDIWNNMTWLQWDKEIDNYTQLIYGLIEESQNQQEKNEQDLLALDKWASLWSWFDISNWLWYIRIFIMIVGGLIGLRIVFAVLSIINRVRQGYSPLSFQTLPHHQREPDRPEGIEEGGGEQDRGRSIRLVSGFLALAWDDLRSLCLFSYHRLRDFILIVARIVETLGRRGWEALKYLWNLLLYWGRELKISAITLLDATAIAVARWTDRIIEIGQRIVRAILNIPRRIRQGAEKALQ

SEQ ID NO: 184 - protein, 865 aa, Artificial Sequence
  Description of Artificial Sequence: Synthetic polypeptide
MRARGIQRNYQHLWKWGTLIFGMLMICNAVDNLWVTVYYGVPVWREAKTTLFCASDAKTYDQEVHNVWATHACVPTDPDPQEIDLRNVTEKFNMWKNDMVEQMHTDIISLWDQSLQPCVKLTPLCVTLNCTNITNISNNNNTDSRNITHSEDPAEMRNCSFNVATGIRDRKKKVYSLFYRLDITPINGSDDSKSSGQYILINCNTSTITQACPKVSFEPIPIHYCAPAGFAILKCKDKQFNGTGTCNNVSPVQCTHGIKPVVSTQLLLNGSLPEGGVIIRSENITNNAKTIIVQLDEPVRINCTRPNNNTRKGIHIGPGGAFYATGEVVGNIRHAWCEVNGTAWKEALKKVVTKLKEHFKNKTIAFQPSSGGDLEITTHSFNCRGEFFYCNTSGLFNSTWPGNTSESNVNTTGNITLPCKIKQIINMWQRVGQAMYAPPIPGIIQCISNITGLLITRDGGNNDNNVTEIFSPGGGDMRDNWRSELYKYKVVEIEPLGVAPTKAKRRVVQREKRAVGIGAVFLGFLAAAGSSMGAASMTLTVQARQLLSGIVQQQSNLLKAIEAQQHLLKLTVWGIKQLQARVLAVERYLKDQQLLGIWGCSGKLICTTTVPWNTTWSNKTLTDIWDNMTWLEWDREIRQYTGIIYNLIEESQNQQEKNEQDLLALDKWATLWSWFDISNWLWYIRIFIIIVGGLIGLRIVFAVFSIVKKARQGYSPLSLQILGPNPGGPDRPERIKEEGGEQGRDRSIRLASGFLALVWDDLRSLGICSYHRLRDFVLIATRTVELLGRSSLKGLRLGWEGLKYLWNLLQYWSQELKNSAISLLGAIAIAVAEGTDRVITVGQRICRAILNIPRRIRQGFERALL

SEQ ID NO: 185 - protein, 868 aa, Artificial Sequence
  Description of Artificial Sequence: Synthetic polypeptide
MRARGIQRNYQHLLRWGTIILGMILICSTTENLWVTVYYGVPVWKDAETTLFCASDAKAYDTEMHNVWATHACVPTDPNPQEIYLENVTEEFNMWKNNMVEQMHTDIISLWDESLKPCVQLTPLCVTLNCSNANANSINANATSTNATAENEKGEIKNCSFNMTTELRDKKKKVYSLFYRLDVIPLNGTENETYTEYRLINCNTSAITQACPKVSFEPIPIHYCAPAGFAILKCRDEKFNGTGPCTNVSTVQCTHGIRPVVSTQLLLNGSLAKEEVRIRSENITNNVKTIIVQLVKPVNITCIRPNNNTRKSIHLGPGRAFYATGDIIGNIRKAHCIVNESEWNEALQQVATQLGKYFENKTINFTSPSGGDLEVTTHSFNCGGEFFYCNTSGLFNSTWVSNNTGKYYSNSTRENPNITLPCRIKQIINMWQRAGQAIYAPPIEGVIRCESNITGLLLTRDGGDKNNTSEIFRPGGGNMKDNWRSELYKYKVVKIEPLGVAPTPARRRVVQREKRAVFGLGAVFLGFLGAAGSTMGAASITLTVQARQLLSGIVQQQSNLLRAIEAQQHLLKLTVWGIKQLQARVLAVERYLKDQQLLGIWGCSGKLICTTNVPWNSTWSNKSYSEIWDNMTWMQWDKEISNYTQTIYNLIEKSQIQQEKNEQDLLALDKWTNLWTWFDISNWLWYIKIFIMIIGGLIGLRIVFAVLSAINRVRQGYSPLSFQTHTPNPEGLDRPGRIEEEGGEQGRGRSIRLVSGFLALAWDDLRSLCLFSYHRLKDFILIAARTVELLGHSSLKGLRLGWEGLKYLGNLLLYWGRELRISASDLLDTIAIAVAGWTDRVIEIGQRIGRAILNIPRRTRQGLERALV

SEQ ID NO: 186 - protein, 855 aa, Artificial Sequence
  Description of Artificial Sequence: Synthetic polypeptide
MRVMGIQRNWQHLLSWGTMVLGMIIICSAVDNLWVTVYYGVPVWKDAETTLFCASDAKAYETEQHNVWATHACVPTDPNPQEMPLKNVTEQFNMWKNNMVEQMHTDIISLWDQSLKPCVELTPLCVTLNCSTITLNNTDTHSTNNTDIDAMRNCSFNVTTELRDKTKRVYSLFYRLDIVQIDGNNSNGSGEYRLINCNTSAITQACPKVSFEPIPIHYCAPAGFAILKCNEKEFNGTGPCKNVATVQCTHGIKPVVSTQLLLNGSLAEGKVMIRSENITDNSKNIIVQFNKTVTINCTRPNNKTKIRSIHIGPGRVFQATQTGDMRKAFCTVNKTEWDKTLEEVAKQLRAHFNNKTIIFKSSSGGDIEITTHSFNCGGEFFYCNTSGLFNSTWEANSTANTSTTNITLPCKIKQLVRMWQRTGQALYAPPIEGVIKCVSNITGLILTRDGGGNNSATNETFRPGGGDMRDNWRSELYKYKVVQIEPLGVAPTEARRRVVKREKRAVPGLFFLGFLAAAGSTMGAASITLTVQARQLLSGIVQQQSNLLRAIEAQQHLLKLTVWGIKQLQARVLTVERYLRDQQLLGIWGCSGKLICTTNVPWNSSWSNKSQTEIWDNMTWLQWDKEISNYTQQIYKLLEESQNQQEQNEQDLLALDKWASLWNWFEISNWLWYIKIFIMIVGGLIGLRIVFAVLSIINRVRQGYSPLSFQTQFPNPAGPGRPGRIEEESGEQDRDRSIRLVSGFLALAWDDLRSLCLFSYHRLRDFILIVARTVELLGHSSLKGLRLGWEGLKYLGNLLIYWGRELKLSAINLFDTIAIVVAGWTDRVIELGQRIVRGFLHIPRRIRQGLERALL

SEQ ID NO: 187 - protein, 856 aa, Artificial Sequence
  Description of Artificial Sequence: Synthetic polypeptide
MKVRGIQRNWPQWWIWGILGFWVIMMCKGVGNLWVTVYYGVPVWREANTTLFCASDAKAYDTEVHNVWATHACVPTDPNPQEIVLENVTENFNMWKNDMVDQMHEDIISLWDQSLKPCVKLTPLCVTLNCTEATFDNNVTDSMKKEMKKCSFNTTTEIRDRKQQAHALFYKLDLVPLNGSSSGYGNYILINCNTSTITQACPKVTFEPIPIHYCAPAGFAILKCKDEAFNGTGPCNNVSTVQCTHGIKPVVSTQLLLNGSLAKGGIRIRSKNITNNAQTIIVQLSKPVKINCTRYNNNTRESIRIGPGQTFYTNKVIGDIRQAHCNISETEWNNTLQEVAKQLVVHFPNKTITFAPAAGGDLEITTHSFNCGGEFFYCNTSGLFNDTFMPNNTANSTKNETQEKNITISCKIKQIIRIWQRVGQAMYAPPIEGLIKCESNITGILLTRDGGNNTNSTEVFRPGGGNMKDNWRSELYNYKVVKIEPLGVAPTGARRRVVEREKRAVVGLGAVFLGFLGAAGSTMGAASLTLTVQARQLLAGIVQQQSNLLQAIEAQQHMLKLTVWGIKQLQARVLALERYLQDQQLLGIWGCSGKLICTTTVPWNSSWSNKSQEEIWKNMTWLQWDKEISKYTGIIYTLLQESQSQQEKNEQDLLALDKWASLWNWFDISNWLWYIKIFIMIVGGLIGLRIVFAVISVVNRVRKGYSPLSFQTLTPNQEGLDRLGRIEEEGGEQGRGRSIRLVSGFFSLAWDDLRSLCLFSYHRLRDLLLIAARTVEHLGSSLLKGLRLAREGLNQLWNLLLYWGAEIKNSAISLLDTTAIAVANWTDRVIELGQGIGRAILHIPRRIRQGFETALL

SEQ ID NO: 188 - protein, 869 aa, Artificial Sequence
  Description of Artificial Sequence: Synthetic polypeptide
MRVKGTQMNLQHLLKWGTMILGLIIICSAAENLWVTVYYGVPVWKDAETTLFCASDAKTYDKEVHNVWATHACVPTDPNPQEINLENVTEDFNMWKNNMVDQMHADIISLWDQALKPCVKLTPLCVTLNCSDSVTTANNSIQNEMKGEIKNCSFNVTTELRDKRQKVYSLFYRLDIVQIDNNNRNSTQYRLINCNTSAITQACPKVSFDPIPIHYCAPAGFAILKCKDENFTGVGPCKNVSTVQCTHGIKPVVSTQLLLNGSLAEKKVMIRSENISNNAKNILVQLTTPVNITCIRPGNNTRKSVHIAPGQAFYATGDIIGDIRQAHCNVNRTQWNNTLKEVANQLRTYFGNETAIIFASSSGGDLEITTHSFNCRGEFFYCNTSGLFHSTWFNSTWFNSTWEDNQANSINDTIVLPCRIKQIINMWQRAGQAIYAPPIPGEIRCESNITGLMLTRDGGNNNNNRTNETKNETFRPGGGDMRDNWRSELYKYKVVKIEPLGLAPTGAKRRVVEREKRAVGIGAVFLGFLGAAGSTMGAASITLTVQARQLLSGIVQQQSNLLKAIEAQQHLLKLTVWGIKQLQARVLAVERYLKDQQLLGIWGCSGKLICTTTVPWNSSWSNRSQSEIWGNMTWQQWEKEISNYTEEIYRLIENSQNQQEKNEQDLLALDKWASLWNWFDISNWLWYIRLFVIIVGGLIGLRIVLAVFSIINRVRQGYSPLSFQIHTPNPGGLDRPGRIEEEDGEQGKSRSIRLVSGFLALAWDDLRSLCLFSYHRLRDFILIATRTVELLGHSSLKGLRLGWEGLKYLWNLLACWGRELKIRAINLLDTLAIATANWTDRVIELLQALGRAFLNIPRRIRQGAERAWL

SEQ ID NO: 189 - protein, 859 aa, Artificial Sequence
  Description of Artificial Sequence: Synthetic polypeptide
MKARGMQRNYQHLWRWGTMLFWMIIMCKAAENLWVTVYYGVPVWRDAETTLFCASDAKAYDKEVHNVWATHACVPTDPNPQEISLENVTEKFDMWKNNMVEQMQTDIISLWDQSLKPCVKLTPLCVTLNCAEPKSTSSNNSSVNSNSSDSLFEEMKNCSFNMTTELRDKRKTVHSLFYKLDIVSTGNGSGQYRLINCNTSAMTQACPKVTFEPIPIYYCAPAGFAILKCKDTNFTGTGPCKNVSTVQCTHGIKPVVSTQLLLNGSLAEKEVMIRSENITDNSKIIIVQLTEPVNITCIRPGNNTRTSIRIGPGQTFYATGDVIGDIRKAYCNVSRAAWNSTLQKISTQLRRYFNNKTIIFKNSPGGDLEVTTHSFNCGGEFFYCNTTDLFNSTWDEHGTVTNSTMANGTITLPCRIKQIINMWQRVGQAMYAPPIKGSIRCESNITGLLLTRDGGSGTNSSNETFRPIGGNMRDNWRSELYKYKVVKIEPIGLARTRAKRRVVEREKRAIGLGAAFLGFLGAAGSTMGAASMTLTVQARQLLSGIVQQQSNLLRAIKAQQHLLKLTVWGIKQLQARVLAVERYLKDQQLLGIWGCSGKLICTTNVPWNSNWSNKSQSEIWDNMTWMQWDREVIYYTDIIYDLIEKSQNPQEKNEQDLLALDKWASLWSWFDISNWLWYIKIFIIIVGGLIGLRIVFAVLSIINRARQGYSPLSLQTLTPHPEGPDRPGRIKEEGGEQGRDRSIRLVSGFLALAWDDLRSLCLFSYRRLRDFISITARTVELLGRSSLKGLRLGWEGLKYLGNLLGYWGQELKSSAINLIDTIAIAVAGWTDRVIEIGQRFCRAIRNIPRIRQGAEKALQ

SEQ ID NO: 190 - protein, 837 aa, Artificial Sequence
  Description of Artificial Sequence: Synthetic polypeptide
MKVRGIKRNLWKWGTMLLGMLMTYSVAEQLWVTVYYGVPVWKDAETTLFCASDAKAYSTEKHNIWATHACVPTDPNPQEIHLESVTEEFNMWKNNMVEQMHTDIISLWDQSLRPCVKLTPLCVTLNCTNVNNNTTNVNNNTGWDEERKNCSFNVTTELRDKRQKVYSLFYKLDVVQIDNSSYRLINCNTSAITQACPKVTFEPIPIHYCAPAGFAILKCKDEKFNGTGPCKNVSTVQCTHGIKPVVSTQLLLNGSLAEKEVMIRSENFTNSAKNILVQFKEPVKINCTRPDNNTRTSIRIGPGQAFYATGIIGDIRQAYCTVNGSEWNKALQKVVEQLRSSFENKTIIFANSSGGDLEITTHSFNCGGEFFYCNTSGLFDSTWNDTDSRQENGTITLPCRIKQIINMWQRTGQAIYAPPIQGAIRCVSNITGLILTRDGGNNNSTNETFRPGGGDMRDNWRSELYKYKVVKIEPLGVAPTKARRRVVGREKRAVGIGAVFLGFLGAAGSTMGAASITLTVQARQLLSGIVQQQSNLLKAIEAQQHLLRLTVWGIKQLQARVLAVERYLKDQQLLGIWGCSGKLICTTNVPWNSSWSNKSQSEIWENMTWLQWEKEISNYTQIIYTLIEESQNQQEKNEQDLLALDKWASLWNWFDISKWLWHIRIFIMIVGGLIGLRIVFAVLSVVNRVRQGYSPLSFQTLLPAPRGPDRPDGIEEEGGEQGRGRSRQLVNGFSTLIWDDLRNLCLFSYHRLRDLILIAARIVELLGRRGWEAIKYLWNLLQYWIQELKNSAISLLNTTAIAVAEGTDRAIEIIQRAITAVLNIPTRIRQGFERALL

SEQ ID NO: 191 - protein, 866 aa, Artificial Sequence
  Description of Artificial Sequence: Synthetic polypeptide
TRVMGIQRNCTPWWRWGIIFLGLIIICKATEKLWVTVYYGVPVWKDAETTLFCASDAKAYEREVHNVWATHACVPTDPNPQEIDLENVTEEFNMWKNNMVEQMHTDIISLWDQSLKPCVKLTPLCVTLNCHNVTKTNSNSNSSVKNEMPGEIKNCSYNVTTAIRDKRQNVYSLFYRVDVVPINENSNSSENSSEYRLINCNTSAITQACPKVTFEPIPIHYCAPAGFAILKCKDKDFNGTGTCRNVSTVQCTHGIKPVVTTQLLLNGSLAEGKVMIRSENLTNNAKTIIVQLDEPVYINCTRPNNNTRKSVHIGPGQAFYATGDIIGDIRQAHCNVSREDWNKTLYKVVEQLRKHFNNRTINFTAPSGGDLEITTHSFNCGGEFFYCNTSGLFNSTWYNSTWNNTDSTQKSNGTEKITLPCRIKQVIKMWQRVGQAMYAPPIQGVIKCVSNITGILLTRDGGNLNSSFETFRPGGGNMKDNWRSELYKYKVVKIEPLGVAPTKAKRRVVEREKRAVGLGAVFLGFLGAAGSTMGAASITLTAQARQLLSGIVQQQSNLLRAIEAQQQMLKLTVWGIKQLQARVLAVERYLKDQQLLGIWGCSGKLICTTNVPWNSSWSNKSYSEIWDNMTWLQWDKEISNYTDLIYNLIEESQNQQEKNEQDLLALDKWASLWNWFNISNWLWYIRIFIMIVGGLIGLRIVFTVLSIINRVRKGYSPLSFQTHSPSPGGLDRPRGIEEEGGEQDRDRSIRLVSGFLALAWNDLRSLCLFSYHRLRDFTLIAARTVELLGHSSLKGLRLGWEGLQYLGNLLLYWGRELKNSAISLLDAIAITVAGWTDRVIEVGQRAGRALLHIPRRIRQGLERALL

SEQ ID NO: 192 - protein, 860 aa, Artificial Sequence
  Description of Artificial Sequence: Synthetic polypeptide
MRARGTQKNCQDLWWIWGTMILGMLIICSAAGNLWVTVYYGVPVWKDAETTLFCASDAKAYSTEKHNIWATHACVPTDPNPQEIDLENVTEKFNMWKNGMVEQMHTDIISIWDQSLQPCVKLTPLCVTLICIDIANDTSRNVTVEMKREIQNCSYNVTTEVRDKKQKVYSLFYKVDIVQISNNSSEYRLINCNTSVIKQACPKVTFEPIPIHYCAPAGYAILKCKDDKFNGTGLCKNVSTVQCTHGIKPVVSTQLLLNGSLAEEEVIIRSENINNNAKTIIVQLYQPVKINCTRPGNNTRKSVHIGTGQAYFATGDIIGDIRQAYCKVNKSEWNNTLQQVVAQLRKHWNKTIIFNSSSGGDLEITTHRFNCGGEFFYCNTSSLFNSTWWSNNSNNTDSEESNSMGLNDTITLQCRIKQIINMWQRVGQAMYAPPIQGVIRCESNITGILLTRDGGDNNNESETFRPVGGDMRDNWRSELYKYKVVKIEPLGVAPTEARRRVVGRGKRAVVGMGAMFLGFLGAAGSTMGAASITLTVQARQLLSGIVQQQSNLLRAIEAQQHLLKLTVWGIKQLQARILAVENYLKDQQLLGIWGCSGRLICTTNVKWNSTWSNKSKSEIWDKMTWLEWDREISNYTDIIYQLIEESQNQQEKNEQDLLALDKWANLWNWFDISNWLWYIKIFIMIVGGLIGLRIVFAVLSVINRVRQGYSPLSFQTHTPSPRDLDRPGRIEEEGGEQGRDRSIRLVSGFLALAWDDLRSLCIFSYHRLRDLLLIAARTVELLGQSSLKGLRLGREKLKYLGNLLLYWGRELRISIINLYDTIAIAVAGWTDRIIEIGQRIGRAILNIPRRIRQGFERALL

SEQ ID NO: 193 - protein, 845 aa, Artificial Sequence
  Description of Artificial Sequence: Synthetic polypeptide
MRVMGIQKNYALLWRWGTIIFWIMIICNADNNLWVTVYYGVPVWKDAETTLFCASDAKAYDQEVHNVWATHACVPTDPNPQEIDLENVTEEFNMWKNNMVEQMHTDIISLWDQSLKPCVKLTPLCVTLNCNNITGNATYDMQREISNCSFNITTEIRDKKQKVNSLFYRLDIVPIGDNKSSEYRLINCNTSALTQACPKVTFEPIPIHYCAPAGFAILKCKDKKFNGTGPCKNVSTVQCTHGIKPVVSTQLLLNGSLAEEGVMIRSENFTNNAKTIIVQLQEPVKINCTRPNNNTRKGVHIGPGQAFYATGGIIGNISKARQYVNTTEWIKALKEVNKTLNQQFVNKTLYFNESSGGDLEITTHSFNCRGEFFYCNTSDLFNSTWLNSTVESNETIILPCKIKQIINMWQRVGQAMYAPPIQGVINCVSNITGILLVRDGGNNNSTAETFRPGGGDMKDNWRSELYKYKVVKIEPLGVAPTRAKRRVVEREKRAVGLGAVFFGFLGAAGSTMGAASITLTVQARQLLSGIVQQQSNLLKAIEAQQHLLKLTVWGIKQLQARVLAVERYLKDQQLLGIWGCSGKLICTTNVPWNSSWSNKSQDEIWDNMTWLQWDREISNYTSTIYNLLEEAQNQQEKNEQDLLALDQWASLWNWFNITKWLWYIKIFIMIVGGLIGLRIVFAVLTLINRVRQGYSPLSFQTLTHHQREPDRPERIEEGGGEQDRDRSVRLVSGFLALAWDDLRSLCLFSYHRLRDFVLIVVRTVELLGHSSLKGLRLGWEALKYLGNLLSYWGQEIKNSAINLLNTTAIAVANWTDRVIEVGQRAGRALLHIPRRIRQGFERALL

SEQ ID NO: 194 - protein, 878 aa, Artificial Sequence
  Description of Artificial Sequence: Synthetic polypeptide
MRVKGIQRNSQHLLRWGTIILGLIIISSAAENLWVTVYYGVPVWRDADTSLFCASDAKTYKTEVHNVWATHACVPTDPNPQEVYLKNVTENFNMWKNNMVEQMHADIISLWDQSLQPCVKLTPLCVTLDCSYNVTVRPNNTAVNYTTFMKEEMKNCSYNMTTEIRDKKKKVYSLFYRLDVVQIDEIDENNSNNSNNTNNSLYRLINCNTSAITQACPKVSFEPIPIHYCAPAGFAILKCRDKNFNGTGPCRNVSSAQCTHGIRPVVSTQLLLNGSLAEGKEVMIRSENITSNTKNIIVQLTKPVQINCTRPSNNTRTSVHIGPGQAFYTTGEIIGDIRRAHCNVSKAKWNETLGKIAIQLEKHFKNKTIKFNPSSGGDMEITTHMFNCGGEFFYCNTTNLFNSNWTIWNGSAISNGSATANTESNDTVITLQCRIKQIINMWQRAGQAIYAPPIKGVIKCNSNITGLILTRDGGDNNSNIETFRPGGGDMRDNWRSELYKYKVVKIEPLGVAPTRARRRVVQREKRAAGLGAVFIGFLGAAGSTMGAASITLTVQARQLLSGIVQQQSNLLRAIEAQQHLLKLTVWGIKQLQARVLAVERYLKDQQLLGIWGCSGKLICTTNVPWNSSWSNKSQNEIWDNMTWLEWDKEISNYTRIIYDLIEDSQNQQEKNEQDLLALDKWASLWNWFDISKWLWYIKIFIIIVGGLIGLRIVCTVLSVINRVRQGYSPLSFQTLAPSPGDRDRPGRIEEEGGEQGRGRSIRLVSGFLALAWDDLRSLCLFSYHRLRDFILIAARTVELLGHNSLKGLRLGWEGLKYLWNLLAYWGRELKISAINLLNTIAIAVAGWTDRVIEIGQRLCRAFINIPRRIRQGFERALL

SEQ ID NO: 195 - protein, 844 aa, Artificial Sequence
  Description of Artificial Sequence: Synthetic polypeptide
MRVMGIQRNYLPLWRWGMIFLGMMIICKATENLWVTVYYGVPVWKDAETTLFCASDAKAYDQEVHNVWATHACVPTDPNPQELDLENVTEEFNMWKNNMVEQMHTDIISLWDQSLKPCVKLTPLCVTLNCSNINSTRYDTKDKEEMKNCSFNITTELRDKRQSVYSLFYKLDVVPINNNSSNNSSNEYRLINCNTSAITQACPKVSFEPIPIHYCAPAGFAILKCKDKKFNGTGPCRNVSTVQCTHGIKPVVSTQLLLNGSLAEEEVMIRSENLTNNAKTIIVQLVTPVQINCTRPNNNTRTSVRIGPGQAFYATGDIIGKIRQAHCTVRRAQWNTTLQQVADQLRKHFNKTINFTRPSGGDLEITTHSFNCGGEFFYCNTSGLFNSTWNSTTIKQNLTNNDTGVINLPCRIRQIVHMWQRVGQAMYAPPIKGVINCTSNITGLLLTRDGGDNNSTDEKFRPGGGDMRDNWRSELYKYKVVKIEPLGVAPTRAKRRVVQREKRAVGLGAVFFGFLGAAGSTMGAASITLTAQARQLLSGIVQQQSNLLRAIEAQQHLLKLTVWGIKQLQARVLAVERYLRDQQLLGLWGCSGKLICTTAVPWNSSWSNKSQNEIWENMTWLQWDKEISNYTDIIYNLIEESQNQQEKNEQDLLALDKWANLWNWFDISKWLWYIKIFIMIVGGLIGLRIVFAVLSIINRVRQGYSPLSFQTHTPNPGGLDRPGRIEEEGGEQDRDRSIRLVSGFLALVWDDLRSLCLFSYHRLRDFTLIAARTVELLGQGLKYLWNLLLYWGRELKSSAISLLNATAIVVAEWTDRVIEVGQRAGRALLHIPRRIRQGLERALL

SEQ ID NO: 196 - protein, 857 aa, Artificial Sequence
  Description of Artificial Sequence: Synthetic polypeptide
MRVMGTQRNWQPLLRWGTMILGMLMICSAADNLWVTVYYGVPVWKDAETTLFCASDAKAYETEKHNVWATHACVPTDPSPQEIPLKNVTEKFNMWKNNMVEQMHTDIISLWDQSLKPCVQLTPLCVTLNCSDVTTNNTKVNTTSAPTTTATVNNDNDMKNCSYNITTELRDKKQKRYSLFYRLDVELINKNNSNSTEYVLINCKTSTLTQACPKVSFEPIPKHYCAPAGFAILKCKDKEFNGTGLCKNVSTVQCTHGIKPVVSTQLLLNGSLVEKRVMIRSANITDNTKNIIVQLKEPVEINCTRPNNNTRKGVHIGLGRRFYTTQVVGDIRQAYCNVSKSKWNDTLKKVVYQLRKYFNKTIIFNSSSGGDVEITTHMFTCGGEFFYCNTSGLFNSTWPVNASEQESNSTESDGIITLRCRIKQIINMWQRTGQAMYAPPIQGIIKCVSNITGLLLTRDGGNSTVNETFRPGGGDMRDNWRSELYKYKVVKIEPLGVAPTKARRRVVGREKRAVGIGAVFLGFLGAAGSTMGAASITLTVQARQLLSGIVQQQNNLLRAIEAQQQLLKLTVWGIKQLQARVLAVERYLRDQQLLGIWGCSEKLICTTNAPWNSSWSNKSQSEIWDNMTWLQWDREINNYTDIIYRLLEDSQNQQEKNEQDLLALDKWSSLWTWFDLSNWLWYIKIFIMIVGGLIGLRIVFAVLAVINRVRQGYSPLSFQTLTPNPGELDRPGRIEGEGGEQDRGRSIRLVSGFLALAWDDLRSLCLFSYHHLRDFILIAARIVGLLGRRGWEGLKYLWNLLIYWGQELKTSAVSLLDTIAIVVAGWTDRVLEIGQRIGRAFINIPRRIRQGFERALL

SEQ ID NO: 197 - protein, 855 aa, Artificial Sequence
  Description of Artificial Sequence: Synthetic polypeptide
MRVMGIQRNYPCLWRWGTMILGLIIICNAQQLWVTVYYGVPVWKDAVTTLFCASDAKAYDAEVHNVWATHACVPTDPNPQEIDLVNVTEEFNMWKNNMVDQMHEDIISLWDQSLKPCVKLTPLCVTLDCHNITINNTNNNTNITDGVREEMKNCSFNMTTELRDKKQKVYSLFYRLDIVQINKTDNNSYRLINCNTSTITQACPKVSFEPIPIHYCAPAGFAILKCKDPEFNGKGPCRNVSTVQCTHGIKPVVSTQLLLNGSLAEREIRIRSENFTNNAKTIIVQLVNPVKINCSRPYNTRKNIRRYSIGSGQAFYVTGKIIGDIRQAHCNVSRRDWNRTIQQVAEQLKKKFNNKTIIFASSSGGDIEITTHSFNCGGEFFYCNTSGLFNSIWNGSMSNDMGPNGTITLQCRIKQIINMWQRVGQAMYAPPIQGVIRCESNITGLLLTRDGGTNNTKNETFRPGGGDMRDNWKSELYKYKVVKIEPLGVAPTRAKRRVVEREKRAVGLGAIFLGFLGAAGSTMGAASITLTVQARQLLSGIVQQQSNLLRAIEAQQHLLKLTVWGIKQLQARVLAVERYLQDQQLLGIWGCSGKLICTTTVPWNSSWSNKSQEDIWNNMTWLQWEKEISSYTGIIYQLIEESQNQQEKNELDLLALDKWANLNWFNISNWLWYIRLFVIIVGGLIGLRIVFTVLSIINRVRQGYSPLSFQTLAPIPEGLGRPGRIEEEGGEQGKDRSIRLVSGFLAIAWDDLRNLCLFSYHRLRDFALIVARAVELLGRSSLKGLRLGWEGLKYLWNLLLYWGRELKISAITLLDAVAVAVAGWIDRVIEIGQTIGRAILNIPRRIRQGLERALL

SEQ ID NO: 198 - protein, 860 aa, Artificial Sequence
  Description of Artificial Sequence: Synthetic polypeptide
MRVMGTQRNCQHLLNWGIMILGMIIICSTAENLWVTVYYGVPVWKDAETTLFCASDAKAYEKEVHNVWATHACVPTDPNPQELYLENVTEDFNMWKNNMVEQMHTDIISLWDQSLKPCVQLTPLCVTLNCSNNVTANTNSTSANLTDSVKGEMRNCSFNITTELRDKKKKVYSLFYKLDIVKINKNKSFRGKNSSGNSSSDRYRLINCNTSAITQACPKVSFEPIPIHYCAPAGFAILKCNEDEFNGTGTCRNVSTVQCTHGIRPVVSTQLLLNGSLAKEEVRIRSENISDNAKTIIVQFTKPVEIICTRPNNNTRKSIRIGPGQAFYGMGDIIGDIRKAHCNVSRSKWNETLKKVAIQLRKYWNTTIIFTNSSGGDLEITTHSFNCGGEFFYCNTSGLFNSSWNENDTKVNYNTESNDTITLQCRIKQIINMWQRTGQATYAPPIPGVIQCRSNITGLLLTRDGGVTNNTNNETFRPGGGDMRDNWRSELYKYKVVKLEPLGVAPTKAQRRVVKREKRAVGLAAVFFGFLGAAGSTMGAASITLTVQARQLLSGIVQQQNNLLRAIEAQQHMLRLTVWGIKQLQARVMAVERYLKDQQLLGIWGCSGKIICTTAVPWNSTWSNKSYTQIWDNMTWLQWDKEISNYTDIIYQLIEESQYQQEKNEKELLELDKWANLWNWFDISNWLWYIKIFIMIVGGLIGLRIVFAVLTVIKRVRQGYSPLSFQIHTPSPRDPDRPGRIEEEGGEQGRDRSIRLVSGFLALAWDDLRSLCRFSYHRLRDFISIATRIVELLGQGLKYLGNLLLYWIRELKISAISLFDTIAIAVAGWTDRVIEIGQRIGRAILHIPRRIRQGFERALL

SEQ ID NO: 199 - protein, 884 aa, Artificial Sequence
  Description of Artificial Sequence: Synthetic polypeptide
MKVRGIQRNYQHLWRWGTLIFGIIIICSAAENLWVTVYYGVPVWKDAETTLFCASDAKAYEREVHNVWATHACVPTDPNPQVMPLADVTEVFNMWMNDMVEQMHEDIISLWDQSLKPCVQLTPLCVTLHCHYVINNTAHKVSVSPEMQEKVANCSFNVTTELRDRKQKVYSLFYREDLVPIDEDKNNSNSASISTSSNSSNCSISDSNSTCINISTYRLINCNTSTITQACPKVSFEPIPIHYCVPAGFAILKCNEKEFNGTGPCKNVSSVQCTHGIKPVVSTQLLLNGSLAKETVIIRTENISDNGKNIIVQFVDPVRINCIRPNNNTRTSVRIGPGQTFYTSDIIGDIRQAYCEVNKTQWNMTLQKVADQLRKFFPNKTINFNQTSGGDLEVTTHIFNCRGEFFYCNTSSLFNSSWPINSTTSNNSTASNETIILPCRIIQIINMWQRLGQAMYAPPIKGLINCVSNITGLLLTRDGGDRNSSYETFRPIGGNMKDNWRSELYKYKVVKIEPLGVAPTKARRRVVEREKRAVGIGAFFLGILGAAGSTMGAASITLTVQARQVLSGIVQQQSNLLKAIEAQQHLLKLTVWGIKQLQARVLAVERYLKDQQLLGIWGCSGKLICTTNVPWNSSWSNKSQGEIWDNMTWMQWDREISNYTDIIYKLIEESQEQQEKNELKLLALDQWASLWNWFDISNWLWYIRIFIMIVGGLIGLRIVFAVLSVVNRVRQGYSPLSFQTLTPSPEGLDRPGKIEEGGGEQDRTRSIRLASGFLALAWEDLRSLCLFSYHRLRDFILIAARTVELLGHSSLKGLRLGWEGLKYLWNLLTYWCQELKTSAISLFDTLAIAVAEWTDRIIEVGHRIGRAFLNIPRRIRQGFERALL

SEQ ID NO: 200 - protein, 850 aa, Artificial Sequence
  Description of Artificial Sequence: Synthetic polypeptide
MRVMGTQMNWQNLWRWGTMILGIIIICSAAENLWVTVYYGIPVWRDAETTLFCASDAKAYDTEVHNVWATHACVPTDPNPQEINLENVTEEFNMWKNNMVEQMHTDIISLWDQSLKPCVKLTPLCVTLNCSSVTNSSVTNITSDMAGEIKNCSFNMTTEIRDKRQKVHALFYRLDVVPMDNNNSLYRLINCNTSAITQACPKVSFEPIPIHYCAPAGFAILKCNDKEFNGTGPCKNVSSVQCTHGIRPVVSTQLLLNGSLAETEVMIRAENITNNIKNIIVQFNKSVEIICIRPNNNTRKSIRIGPGQAFYATGDIIGDIRQAYCDVNRTEWNEALQKVVNQLKTHFKNKTIIFNSSSGGDLEITTHSFNCGGEFFYCNTSGLFNSTWNGTDSMQKLNSTGNITLPCRIKQIINMWQRAGQAIYAPPIQGVIRCESNITGLILTRDGGNDNNESEIFRPGGGDMRDNWRSELYKYKVVKIEPLGVAPTKAKRRVVEREKRAIGIGAVFIGFLGAAGSTMGAASITLTVQARQLLSGIVQQQSNLLMAIEAQQHLLKLTVWGIKQLQAQVLAVERYLRDQQLLGIWGCSGKLICTTTVPWNSSWSDVSQSEIWENMTWLQWDKEISNYTQIIYSLIEESQNQQEKNEQDLLALDKWANLWNWFDISKWLWYIKIFIMIVGGLIGLRIVIAVISIINRVRQGYSPLSFQIHTPSPGGLDRPGRIEEEGGEQDRNRSIRLVNGFLALAWDDLRSLCLFCYRRLRDFILIVARTVELLGHSSLRGLRLGWEGLKYLKNLLSYWGRELKLSAINLLDTIAIVIAGWTDRVIEIGQGFCRAIFPRRSKQGLKRALQ

SEQ ID NO: 201 - protein, 873 aa, Artificial Sequence
  Description of Artificial Sequence: Synthetic polypeptide
MRVMGTQKNCPLLWRWTLIFGLIIICSATGKLWVTVYYGVPVWRDAETTLFCASDAKAYDTEVHNVWATHACVPTDPSPQEVDLTNVTENFNMWKNNMVEQMHTDIISLWDQSLKPCVKLTPLCVTLNCSNITSTSSNNNSSNITNASSSSSNNSSNSTVDERNKVMTNCSFNMTTELRDKIQKVHSLFYRSDVVGINGNKEYRLINCNTSTITQACPKVSFEPIPIHYCAPAGFAILKCKDKEFNGTGPCKNVSSVQCTHGIKPVVSTQLLLNGSLAEEGIRIRSENLTNNAKIIIVQLTKPVRINCTRPYNNTRKSIRIGPGQSWYATGDIIGNIRQAFCNVSKTDWNTALQQVAAQLGRHFNNKKITFKNSSGGDLEITTHSFNCRGEFFYCNTSGLFSGSWYNGTWANDSWSAGPGTNDNITLPCKIKQIIRMWQRVGQAMYAPPIQGEINCVSNITGLLLTRDGGNSSEEIFRPGGGDIRDNWRSELYKYKVVKIEPLGVAPTRARRRVVGREKRAVGLGAVFLGFLGAAGSTMGAASITLTVQARQLLSGIVQQQSNLLRAIEAQHHLLKLTVWGIKQLQARVLAVERFLKDQQLLGIWGCSGKLICTTNVPWNSSWSNKSQEQIWNNMTWLQWDREIDNYTQIIYNLIEESQNQQEKNEQDLLALDKWASLWTWFDISNWLWYIKIFIMIVGGLIGLRIVFAVLSIMNRVRQGYSPLSFQTHTPVVPTGPDRPGRIEEESGEQDRNRSIRLVSGFLALAWDDLRSLCLFSYRHLRDFILIAARAVELLGHSSLKGLRLGWEGLKYLWNLLVYWGRELKNSAISLLDTVAVAVAGWTDRVIEIGQRVGKAIIHIPRRIRQGLERALL

SEQ ID NO: 202 - protein, 869 aa, Artificial Sequence
  Description of Artificial Sequence: Synthetic polypeptide
MRVMGTQRNYPPLWKLGIMVLGMIIICCNAADNLWATVYYGVPVWKDAETTLFCASDAKAYKTEMHNVWATHACVPTDPNPQEIKLDNVTEEFNMWKNNMVEQMHADIISLWDQSLKPCVQLTPLCVTLNCSDVKVNTTKNNGTNSSNVLVINGTENGQEELKNCSYNVTTELRDKKQRVYSLFYRLDIVPINEDNKSSDNSSGEYRLINCNTSAITQACPKVSFEPIPIHFCAPAGFAILKCRDKNYNGTGLCKNVSTVQCTHGIKPVVSTQLLLNGSLAEGEIKVRSENFTNNAKTIIVQLDQPVIINCTRPNNNTRRSVRIGPGQAYYATGEIIGDIRKAYCTVNKTAWNETKHKVMEKLRGIYHRPIKFNSSSGGDLEITTHMFNCGGEFFYCNTSGLFAQELKNDTNDNNTIILLCKIKQIINMWQRVGQAMYAPPRAGVIRCVSNITGLLLTRDGGKNDNGTNGTEIFRPGGGDMRDNWRSELYKYKVVRIEPVGVAPTRAKRRVVEREKRAVGLGAVFLGFLGAAGSTMGAASLTLTVQARQLLSGIVQQQSNLLRAIEAQQHMLRLTVWGIKQLQARVLAVERYLRDQQLLGIWGCSGKLICTTNVPWNSSWSNKSYEDIWDNMTWLQWDKEISNYTALIYDLIEESQNQQEKNEKDLLELDKWASLWNWFSISQWLWYIKIFIMVVGGLIGLRIIFAVLSLVNRVRQGYSPLSFQTHPPAPVGLDRPGGIEEEGGERGRDRSIRLVSGFLALAWDDLRNLCLFCYHRLRDFILIAARTVELLGRNSLKGLRLGWEGLKYLWNLLAYWGRELKISAINLLDTIAIAVGGWTDSLIELTQRIGRAILHIPRRIRQGFERALL

SEQ ID NO: 203 - protein, 868 aa, Artificial Sequence
  Description of Artificial Sequence: Synthetic polypeptide
MRVMGIQMNYQHLLTWGTIILGMILICSPAENLWVTVYYGVPVWREADTTLFCASDAKAYETEKHNVWATHACVPTDPNPQEIHLANVTENFDMWKNNMVEQMHTDIISLWDQSLQPCVKLTPLCVTMNCSEPKFNNTNFNSTGSNSTGIQEEMRNCSFNMTTELKDKKKEVYSLFYRLDIVQIDSKKGNSSDYRLINCNTSAVKQACPKVSFNPIPIHYCAPAGFAILKCRDEDFNGTGPCKNVSTVQCTHGIMPVVSTQLLLNGSLAKENVQIRSENISNNAKIILVQLAHPVRINCTRPGNNTRKSIHMGPGQAFYARGDVIGDIRQAYCNVSSSEWSNTLYKVAEQLRKHYGNETTIKFTNHSGGDLEVTTHSFNCGGEFFYCNTTNLFNSSIPFNASERANNTNSTDDIITLQCRIKQIVRMWQRVGQAMYAPPIPGVIRCESNITGLMLTWDGGSKNITEGNRTETFRPGGGDMRDNWRSELYKYKVVKIEPLGVAPTKARRRVVGREKRAVGIGAVFLGFLGAAGSTMGAASVTLTVQARQLLSGIVQQQSNLLRAIEAQQQLLKLTVWGIKQLQARVLALERYLKDQQLLGIWGCSGRLICTTNVPWNSSWSNKSYNEIWDNMTWLQWDREIENYTQIIYGLIEESQNQQEKNEQDLLSLNKWADLWSWFNITNWLWYIKIFIMIVGGLIGLRIVFAVLSVINRVRQGYSPLSFQTHLPNPGGLDRPERIEEEDGEQGRTRSIRLVSGFLALAWDDLRSLCLFSYHRLRDFILIAARTVELLGHSSLKGLRLGWEGLKYLWNLLVYWGRELKTSAISLVDTIAIVVAGWTDRAIEIGQRIGRAILHIPIRIRQGLERALL

SEQ ID NO: 204 - protein, 858 aa, Artificial Sequence
  Description of Artificial Sequence: Synthetic polypeptide
MRVKGIRKNYQHLWRWGTMLLGMLMICSAAEPEQLWVTVYYGVPVWKEATTTLFCASDAKAYDTEVHNVWATHACVPTDPSPQEVALENVTENFNMWKNNMVEQMHEDIISLWEQSLKPCVKLTPLCVTLNCTDELNNVTSRIGEKMKGEIKNCSFNITTSIRDKVKKYALFYKLDVVPIDNDNTTTNTTANYRLINCNTSVITQACPKVSFEPIPIHYCAPAGFAILKCKDKKFNGKGLCTNVSTVQCTHGIRPVVSTQLLLNGSLAGEEVVIRSDNFTNNAKTIIVQLKEAVEINCTRPNNNTRKSIHIQPGRAFYTTGDIIGDIRQAHCNLSKANWNNTLKQIVIKLRQQFNNKTIVFNHSSGGDPEIVMHSFNCGGEFFYCNSTQLFNSTWPFNSTLNDTSTEGNATITLPCRIKQVVNTWQEVGKAMYAPPIRGQIRCSSNITGLLLTRDGGTSENGTNEIEIFRPGGGDMRDNWRSELYKYKVVKIEPLGVAPTKAKRRVVQREKRAVGTIGAMFLGFLGAAGSTMGAASITLTVQARLLLSGIVQQQNNLLRAIEAQQHLLQLTVWGIKQLQARVLAVERYLRDQQLLGIWGCSGKLICTTAVPWNTSWSNKSLDKIWNNMTWMEWEREIDNYTSLIYTLIEESQNQQEKNEQELLELDKWASLWNWFDITKWLWYIKIFIMIVGGLVGLRIVSTVLSIANRVRQGYSPLSFQTRLPAPRGPDRPEGIEEEGGERDRDRSGRLVNGLLALIWDDLRSLCLFSYHRLRDLLLIAARIVELLGRRGWGILKYWWSLLQYWSQELKNSAVSLLNATAIVVAEGTDRVIEVVQRIYRAFLHIPRRIRPGLERALL

SEQ ID NO: 205 - protein, 849 aa, Artificial Sequence
  Description of Artificial Sequence: Synthetic polypeptide
MKVMGTKKNYQHLWRWGIMLLGMLMMSSAAEQLWVTVYYGVPVWREANTTLFCASDAKAYDTEVHNVWATHACVPTDPNPQEVVMGNVTEDFNMWKNNMVEQMHEDIISLWDQSLKPCVKLTPLCVTLHCTNVTISSTNGSTANVTMREEMKNCSFNTTTVIRDKIQKEYALFYKLDIVPIEGKNTNTSYRLINCNTSVITQACPKVSFEPIPIHYCAPAGFAILKCNNKTFNGKGPCRNVSTVQCTHGIKPVVSTQLLLNGSLAEEDIIIRSENFTNNGKNIIVQLKEPVKINCTRPGNNTRRSINIGPGRAFYATGAIIGDIRKAHCNISTEQWNNTLTQIVDKLREQFGNKTIIFNQSSGGDPEVVMHTFNCGGEFFYCNSTQLFNSTWFNNGTSTWNSTADNITLPCRIKQVINMWQEVGKAMYAPPIRGQIDCSSNITGLILTRDGGSNSSQNETFRPGGGNMKDNWRSELYKYKVVKIEPLGIAPTRAKRRVVQREKRAVTLGAVFLGFLGAAGSTMGAASLTLTVQARLLLSGIVQQQSNLLRAIEAQQHMLQLTVWGIKQLQARVLAIERYLKDQQLLGIWGCSGKLICTTTVPWNTSWSNKSYDYIWNNMTWMQWEREIDNYTGFIYTLIEESQNQQEKNELELLELDKWASLWNWFNITNWLWYIKLFIMIIGGLVGLRIVCAVLSIVNRVRQGYSPLSFQTRLPNPRGPDRPEETEGEGGERDRDRSARLVNGFLAIIWDDLRSLCLFSYHRLRDLLLIVARVVEILGRRGWEILKYWWNLLKYWSQELKNSAVSLLNVTAIAVAEGTDRVIEIVQRAVRAILHIPTRIRQGFERALL

SEQ ID NO: 206 - protein, 845 aa, Artificial Sequence
  Description of Artificial Sequence: Synthetic polypeptide
MRVTGIRKNYQHLWRWGTMLLGMLMICNAAENLWVTVYYGVPVWKEATTTLFCASDAKAYDTEVHNVWATHACVPTDPNPQEVVLGNVTENFNMWKNNMVEQMHEDIISLWDQSLKPCVKLTPLCVTLNCTNLKNATNTSSTMEGGEIKNCSFNITTSIKTKVKDYALFYKVDVVPIGNDSTSYRLINCNTSVITQACPKVSFEPIPIHYCTPAGFAIIKCNNKKFNGTGPCTNVSTVQCTHGIRPVVSTQLLLNGSLAEEEVVIKFSNFTDNARVIIVQLNESVEIKCIRPNNNTRKSIHLGPGKAWYTTGQIIGDIRQAHCNLSSTKWNNTLKQITKKLREQFGNKTIVFNQSSGGDPEIVMHSFNCGGEFFYCNTSQLFNSTWNDTGTWNDTTGNSTITLPCRIKQIVNMWQEVGKAMYAPPIEGQIRCSSNITGLLLTRDGGNNESKPTETFRPGGGDMRDNWRSELYKYKVVKIEPLGVAPTKARRRVVQREKRAVGTIGAMFLGFLGAAGSTMGAASITLTVQARQLLSGIVQQQRNLLRAIEAQQHLLQLTVWGIKQLQARVLAVERYLKDQQLLGIWGCSGKLICTTAVPWNASWSNKSLHEIWNNMTWMEWEREIDNYTREIYTLIEESQNQQEKNELELLELDKWASLWNWFDITKWLWYIKIFIMIVGGLVGLRIVFAVLSIVNRVRQGYSPLSLQTRFPAQRGPGRPEGIEEEGGERDRDRSERLVTGFLSLIWEDLRSLCLFSYHRLRDLLLIVARIVELLGRRGWEVLRYWWNLLQYWIQELKNSAIGLLNATAIAVAEGTDRVIEVVQRAYRAILHIPTRIRQGLERALL

SEQ ID NO: 207 - protein, 859 aa, Artificial Sequence
  Description of Artificial Sequence: Synthetic polypeptide
MTVMGIRKNCQHWLTWGTMLLGMLIICSAEDLWVTVYYGVPVWKEASTTLFCASEAKAYSTEVHNVWATHACVPTDPNPQEVVLGNVTENFNMWKNNMVEQMQEDVISLWDESLKPCAKLTPLCVTLNCTDWKSNTTNTSSTTNATQSSWENMNGEIKNCSFNVTTQIRNKVRKEQALFNSLDVVPIDNNNSMYMLTNCNTSVITQACPKISFEPIPIHYCTPAGFAIIKCNDKTFNGTGPCTNVSTVQCVHGIRPVVSTQLLLNGSLAEEDMVIRSENFTNNAKTIIVQLNETVKIECIRPNNNTRKSIQLVGGRSLYATGDIIGDIRQAHCNVSAQNWTETLKRVAIKLRDQFEHKNKTIFLRPPSGGDPEIVMLTLNCGGEFFYCNTTKLFNHNLTENNTWQENASESTITLPCRIKQIINRWQEVGRAMYAPPISGQIKCSSNITGLLLTRDGGKTNGSENGSEIFRPGGGDMRDNWRSELYKYKVVKIEPLGIAPTKAKRRVVQREKRAVGTIGAMFLGFLGAAGSTMGAASMTLTVQARLLLSGIVQQQNNLLRAIEAQQHMLQLTVWGIKQLQARVLAVERYLRDQQLLGIWGCSGKLICTTAVPWNASWSNKSTDEIWGNMTWMQWEREIDNYTELIYTLLEKSQNQQEKNEQELLELDKWANLWSWFDISNWLWYIRIFIMIVGGLKGLRIIFTVFSIVNRVRQGYSPLSFQTRLPAQKGPDRPEETEEGGGERDRGRSTRLVHGFLALIWDDLRSLCLFSYHRLIDLLSIVARIVELLGRRGWEALKYWWNLLQYWSQELKKSAVSLLNATAIAVAEGTDRVIAVIQAIGRAIIHIPRRIRQGAEIALL

SEQ ID NO: 208 - protein, 850 aa, Artificial Sequence
  Description of Artificial Sequence: Synthetic polypeptide
MKVKETRKSCQHLRGILLLGMLMICSAEDQLWVTVYYGVPVWKEATTTLICASDAKAYDTEAHNVWATHACVPTNPNPHEVVLENVTEKFNMWKNNMVEQMHEDIISLWDQSLKPCVKLTPLCVTLHCTNLTNSTTTSISPTMSIQKIKNCSFNTTTSMRDKIEKKHALFYDLDVVQIDNDKNKTNTRYRLRHCSTSTLACAWTNIDSVPIPYCARAAFGIAIRKCKDFDVNGPCPCVNAAQWTPGLKLKVSIPLLLIVILSEGDIDIASDTISDNAKTIIVQLNETVQISCTKPNNNTRKSIHIGPGRAFYATGDIIGDIRQAYCNVSGKAWNKTLGKVVIKLREQFINKTIVFRRSSGGDPEIVLHNFTCGGEFFYWNTTSLFDSTWNTNATWDRNWNDTSGENDIITLPCRIKQIIYMGQEVGKAMYAPPITGLISCSSNITGLLLIGCGGESYNDEIFTPGGGNMKDYWRSELYKYDVQEIEPLLVAPTKAKRIVVHREKRAFRFGSMFLGFLEAPGSTMGAASITLTVQAILLLSGILHQHSNLLKAIEAHQLLLLVTVSLISNLQCRIPAEQRQLKYRQLLGICCCSGKIHYAPAAPWNTSWSNRSRDHILHNKTCRQWEKEIDNYTSLIYTLIEESQNQQEKNELDFVELDKWASLRNWFDKSNWLWYIKIFIMIVGVLIGLRIMFAVLSIVNRVRQGSSSLSCQTRFPAPRGPDRPEGIEEDGGEQGRDRSIRLVDGFLALIWDDLRSLCLFSYHRLRDLLLIAARVVELLGRRGREILKYWWNLLQYWTQELKKSAISLFNATAIAVAEGTDRVIELLQRTGRAILHIPVRIRQGLERLLL

SEQ ID NO: 209 - protein, 855 aa, Artificial Sequence
  Description of Artificial Sequence: Synthetic polypeptide
MRVRGIRKNYRHLWRWGTMLLGMLMICSAADKLWVTVYYGVPVWKEAPTTLFCASDAKAYKTEMHNVWATHACVPTDPNPQEVLLGNMTENFNMWENNMVEQMQEDVISLWDQSLKPCVELTPLCVTLNCTDYNGNNTNSTHTNSSSSEGEKLEKGEIKNCTFNITTNIGDKQRDYAFFYKLDLEPINKDNASYRLISCNTSVITQACPKVSFEPIPIHYCTPAGFALLKCNDKKFNGTGPCTNVSTVQCTHGIRPVVSTQLLLNGSLAEEEVVIRSANFSNNGKIIIVQLNETVEINCTRPNNNTRKGIQLGQGRALYATGDIIGDIRQAYCTINGTKWNKTLNQIAEKLREQFGENKTIKFQPSSGGDPEVVMHSFNCGGEFFYCNTSSLFNWSTNGSNITNGSNITKTIPCRIKQIINMWQKVGKAMYAPPIRGQINCLSNITGLLLTRDGGNQTEFNNTEIFRPGGGDMRDNWRSELYKYKVVKIEPLGVAPTKARRRVVQREKRAVGTIGAMFLGFLGAAGSTMGAASLTLTVQARLLLSGIVQQQNNLLRAIEAQQHLLQLTVWGIKQLQARVLAVERYLQDQQLLGIWGCSGKLICTTNVPWNSSWSNKTLNQIWENMTWMQWEREIDNYTREIYSLIEEAQNQQEKNEQDLLELDKWDNLWSWFSITKWLWYIKIFIMIVGGLIGLRIVFAVLSIVNRVRQGYSPLSLQTRLPAQRGPDRHEETGEEGGERDRDTSGRLVTGFLALIWDDLRSLFLFSYHHLRDLLLIVARIVELLGRRGWEVLKLWWNLLQYWSQEIKNSAVSLLNATAIIVAEGTDRIIEIAQRTYRAILHIPTRIRQGLERALL

SEQ ID NO: 210 - protein, 867 aa, Artificial Sequence
  Description of Artificial Sequence: Synthetic polypeptide
MRVTGIRKNYQHLWRWGTLLLGMLMICSAAEKLWVTVYYGVPVWKDANTTLFCASDAKAYATEVHNVWATHACVPTDPNPQEVVLGNVTENFDMWKNDMVEQMHEDIISLWDQSLKPCVKLTPLCVTLNCTNVRPLNCTDGKPPNCTAVEPSTSGNNSSATGGGEMKNCSFNVTTSIRTKKTYATFYNLDIVKINDDNDSTSTSYRLINCNTSVITQACPKVSFEPIPIHYCTPAGFAILKCNNKTFNGKGPCTNVSTVQCTHGIRPVVSTQLLLNGSLAEGEVVIRSSNFTDNAKIIIVQLNEPVVINCTRPNNNTRKSIPLGPGQAWYTTGDIIGNIRQAHCNLSRTEWNNTLRQITKKLREHIGNKTITFNQSAGGDPEIVMHSFNCGGEFFYCNTSQLFNSTWPWNDTSTGNDTTGNSTITLPCKIRQIVNRWQEVGKAMYAPPIAGPISCSSNITGLLLTRDGGNGSADNETFRPGGGDMRDNWRSELYKYKVVQIEPLGVAPTKAKRRVVQREKRAVGTIGAMFLGFLGAAGSTMGAASITLTVQARQLLSGIVQQQRNLLRAIEAQQHLLQLTVWGIKQLQARVLAVERYLKDQQLLGIWGCSGKLICTTAVPWNASWSNKSLSQIWDNMTWMEWEREINNYTKEIYTLIEQSQNQQEKNELELLELDKWASLWNWFDITNWLWYIRIFIMIVGGLVGLRIVFAVLSIVNRVRQGYSPLSLQTRFPTQRGPGRPEGIEEEGGEQDRDRSERLANGFLTLFWEDLRSLCLFSYHHLRDLLLIVARIVELLGRRGWEALKYWWNLLQYWIQELKNRAVSLFNATAIAVAEGTDRVIEVVQRAFRAVLNIPRRIRQGLERSLL

SEQ ID NO: 211 - protein, 852 aa, Artificial Sequence
  Description of Artificial Sequence: Synthetic polypeptide
MRVKGIRKNYQHLWRWGTMLLGLLIICSAAERLWVTVYYGVPVWKEATVTLFCASDAKAYDTEVHNVWATHACVPTDPNPQEVVLENVTENFNMWKNNMVEQMHEDIISLWDQSLKPCVKLTPLCVTLNCTDWRNATNTTSSSGGTIEGGEIKNCSFNITAGIRDKVQKEYALFYKLDVVPIDNDNSSYRLISCNTSVITQACPKVSFDPIPIHYCAPAGFAILKCNDKKFDGKGPCTNVSTVQCTHGIRPVVSTQLLLNGSLAEEEVVIRSDNFTDNAKTIIVQLNESIEINCTRPNNNTRKSIHIGPGRAFYTTGEITGDIRQAHCNLSRAKWDNTLKQIADKLRKQLKNKTIVFNQSSGGDPEIVMHSFTCGGEFFYCNSTKLFNSTWNGTEGSNNSGTRANNSHILTLPCRIKQIINMWQEVGKAMYAPPIRGQIRCSSNITGLLLTRDGGNNNSGTEIFRPGGGDMRDNWRSELYKYKVVKIEPLGVAPTKAKRRVVQREKRAVGIGAVFLGFLGAAGSTMGAASMTLTVQARLLLSGIVQQQNNLLRAIEAQQHLLQLTVWGIKQLQARVLAVERYLKDQQLLGIWGCSGKLICTTTVPWNTSWSNKSLAEIWNNMTWMEWEREINNYTSLIYNLIEESQNQQEKNEQELLELDKWASLWNWFDITKWLWYIKIFIMIIGGLVGLRIVFTVLSIVNRVRQGYSPLSFQTHLPAPRGPDRPEGIEGEDGERDRDRSGRLVGGFLALFWVDLRSLCLFSYHRLRDLLLIVTRIVELLGRRGWEVLKYWWNLLQYWSQELKNSAVSLLNAAAIAVAEGTDRVIEILQRAGRAILHIPTRIRQGLERALL

SEQ ID NO: 212 - protein, 869 aa, Artificial Sequence
  Description of Artificial Sequence: Synthetic polypeptide
MKVMETRRSWLPLWRGGILLLGILMICSTENLWVTVYYGVPVWKEATTTLFCASDAKAYSSEKHNIWATHACVPTDPSPQEIPLENVTENFNMWKNDMADQMHEDIISLWDQSLKPCVKLTPLCVTLNCTNLNCTSSQNHNTTCRNVSKEMEGEIKNCSFYTTTNIRDRVTKNYALFYSLDIVPIDDNNNTNISYRLTSCNTSIITQACPKVSFEPIPIHYCAPAGFAILKCNDQEFNGTGPCKNVSTVQCTHGIRPVVSTQLLLNGSLAEKDIVIRSSNISDNTKTIIVQLKEAIIIDCIRPNNNTRRSIHIGPGRAFYGTGDIIGNIRQAYCSINISKWDETLRQIAGKLGEQLNKTKIITFKNSSGGDPEITMFNFNCGGEFFYCNSTQLFNSIWTKNDNGIWTKNETNGNWTRSGSTNDNDTIILPCRIRQIINMWQEVGKAMYAPPIRGNISCSSNITGLLLTRDGGNNNDSANETFRPGGGNMKDNWRSELYKYKVVEIEPLGLAPTRAKRRVVQREKRAALGALFLGFLGAAGSTMGAASVTLTVQARLLLTGIVQQQNNLLKAIEAQQHLLQLTVWGIKQLQARVLSIERYLKDQQLLGIWGCSGKLICTTAVPWNTSWSNKSVDMIWHNMTWMEWEREIDNYTGLIYKLLEASQNQQEQNEQELLELDKWASLWNWFDITNWLWYIKIFIMIVGGLIGLRIVFTVLSIVNRVRKGYSPLSFQTHRPAPRGPDRPEGIEEEGGERDRDTSGPLVTGFLAIIWVDLRNLCLFSYHRLRDLLLIVARIVELLGRRGWEALKYWWNLLQYWIQELKNSAVSLYNTIAIAVAEGTDRIIEVLHRIWRAILNIPRRIRQGLERALL

SEQ ID NO: 213 - protein, 854 aa, Artificial Sequence
  Description of Artificial Sequence: Synthetic polypeptide
MRVKGIRKNYPHWWRWGIMVLGMLMIWSAKEQLWVTVYYGVTVWKGLPVWKNATTTLFCDTELHNVRDKCACVPTDPNPQEVVMGNVTEYFNMWKNDMVEQMHEDIISLWDRSLKPCVIFTPLCVTLNCNDLKNVTNTNCSSGRGIVEKLDISNCSVSISTFITGHVVIADEVMDTDDILLVSIDSINNKLTLCNTSLMTQACRSERCKPIPIHYCAPAGFAILKCNNKTFNGKGPCKNVSTVQCTHGIKPVVSTQLLLNGSLAEEEVVIRSENFTDNTKTIIVQLNESVVINCTRPSNNTRKSIRIHRGPGQAFFATGKIGDIRQAHCNLSRAEWNKTLAQIAKKLGKQFGENKTISFQPSSGGDIEIVTHSFNCGGEFFYCNTTPLFNSSWYKSNWKSQRTKEIGGRETITLQCRIKQIVNMWQEVGRAMYAPPIKGQIRCSSNITGVLLTRDGGNTTNHSEIFRPGGGNMKDNWRSELYKYKVVQIEPLGIAPTKAKRRVVQREKRAIGFGAVFLGFLGAAGSTMGAASVTLTVQARQLLSGIVQQQSNLLNAIQAQQHLLQLTVWGIKQLQARVLAVERYLKDQQLLGIWGCSGKLICTTAVPWNASWSNKSLEYIWDNMTWMEWEREINNYTRLIYHLIEESQNQQEKNEKELLELDKWASLWNWFDITKWLWYIKIFIMIVGGLIGLRIVFVVLSIINRVRQGYSPLSFQTRHPAQRGPDRPEGIEGEGGERDRGGSERLVDGFLAIIWVDLRSLCLFSYHRLRDLLSILTRIVELLGRRSWEALKYCWNLLQYWSQELKNSAVSLLNATAVAVAEGTDRIIEIVQRACRAFLHIPRRIRQGFERLLL

SEQ ID NO: 214 - protein, 864 aa, Artificial Sequence
  Description of Artificial Sequence: Synthetic polypeptide
MRAKEMKKHWQRSWKGGILLLGMLMICSATAPDKWVTVHYGVPVWREAKTTLFCASDAKAYSTEKHNVWATHACVPTDPNPQEVVLGNVTENFNMWKNDMVEQMHEDIISLWDQSLKPCVKLTPLCVTLNCIDEITNRTNNTHKDGQLMDKGEIKNCSFNTTTSVQDKLQKVSALFYKPDVVRIGDNNNSSNSSSYRLINCNTSIITQACPKVSFEPIPIHYCTPAGFAILKCNDKNFNGSGLCTNVSTVQCTHGIRPVVSTQLLLNGSLAENEVVIKSENFTDNAKTIIVQLKEAVQINCTRPNNNTRKSIHIGPGRAFYATGNIIGDIRKAYCTINITKWNKTLEQIVDKLRDKFGENKTIVFNSSAGGDPEIVTHSFNCGGEFFYCNTTQLFNSTWNLNSTWNGTKNLNNTTRNDTIILPCRIRQIINLWQKVGKAMYAPPIRGQINCTSNITGLLLTRDGGNTSETNTTEVFRPGGGNMRDNWRSELYKYKVVEIEPIGIAPTKAKRRVVQREKRAVGIGAVFLGFLGAAGSTMGAASVALTVQARQLLSGIVQQQNNLLRAIEAQQHMLKLTVWGIKQLQARVLAVERYLRDQQLLGIWGCSGKLICTTAVPWNNSWSNKSLEYIWGNMTWMEWEREIDNYTGLIYNLIEESQLQQEKNEQELLELDKWASLWNWFDITNWLWYIKIFIMIVGGLVGLRIVFAVLAIANRVRQGYSPLSLQIRPPAQRGPDRPEGIEEEGGDRDRDTSTRLVHGFLALVWDDLRSLCLFSYHRLRDLLLIVTRIVELLGHRGWEALKYWWNLLQYWIQELKSSTVSLFNYTAIAVAEGTDRIIEIVGRVFRAFIHIPRRIRQGLERLLL

SEQ ID NO: 215 - protein, 853 aa, Artificial Sequence
  Description of Artificial Sequence: Synthetic polypeptide
MRVKGIRKNYQHWWRWGIMLLGMWMICSADEMWVTVYYGVPVWKEATTTLFCASDAKAYDTEVHNVWATHACVPIDPNPQEVELVNVTENFNMWKNNMVEQMHEDIISLWDQSLKPCVKLTPLCVTLNCSNLRNETNIKNATNSSSGKVMEKGEMKNCSFNVTTNIGNKVQKEYALFYKLDVVQIDNTSYTLINCNSSIITQACPKISFEPIPIHYCTPAGFAILQCNDKKFNGSGPCSNVSTVQCTHGIRPVVSTQLLLNGSLAEEEVVIRSENFTNNAKTIIVQLNASVEINCTRPNNNTRKSIHLGPGSTIYATGDIIGDIRQAHCNISETKWNNTLRQIVIKLREQFGNKTTIVFNQSSGGDPEIVMHSFNCGGEFFYCNTAQLFNSTWIWNDTKGLNKTAENGTFTLPCRIKQIINRWQEVGKAMYAPPIRGQIRCSSNITGLLLTRDGGAESRNGTEIFRPGGGDMRDNWRSELYKYKVVRIEPLGIAPTKARRRVVQREKRAVGTIGAMFLGFLGAAGSTMGAASMTLTVQARLLLSGIVQQQNNLLRAIEAQQHLLQLTVWGIKQLQARVLAVERYLKDQQLLGIWGCSGKLICTTNVPWNTSSNKSQNEIWDNMTWMQWDREINNYTNLIYTLLEESQNQQEKNEQELLELDKWSNLWNWFSISNWLWYIRIFIMIVGGLIGLRIIFSVLSIVNRVRQGYSPLSFQTHFPSPRGPDRPEGIEGEGGERNRDGSGPLVNGFLTLIWVDLRSLCLFIYRRLRDLLLIVARSVELLGLRGWEVLKYWWNLLHYWSQELKKSAVSLLHATARAVAEGTDRAIEILQRAYRAILHIPRRIRQGLERALL

SEQ ID NO: 216 - protein, 854 aa, Artificial Sequence
  Description of Artificial Sequence: Synthetic polypeptide
MRVKEKYQHLWRWGWKWGTMLLGILMICSATEKLWVTVYYGVPVWKETTTTLFCASDAPAYDTEVHNVWATHACVPTDPNPPEVVLVNVTENSHMWTNDMVEQMHEDIISLWDQSLKPCVKLTPLCVSLKCTDLKNDTNTNSSSGRMIMEKGEIKNCSFNIGTSIRDKVQKEYAFFYKLDIVPIDNTSYRLISCNTSVITQACPKVTFEPIPIHYCAPAGFAILKCNNKTFNGTGPCTIVSTVQCTHGIRPVVSTQLLLNGSLAGEDVVIRSANFTDNAKTIIVQLNTSVEINCTRPYNNKRKSIRIQRGPGRAFVTIGKIGNMRQAHCHISRAKWNATLKQIASKLREQFGNNKTIIFKQSSGGDPEIVTHSFNCGGEFFYCNSTQLFNSTWFNSTWSTEESNNTEGSDTITLPCRIKQFINMWQKVGKAMYAPPISGQSRCSSNITGLLLTRDGGNNNNGSQIFRPGGGDMRDNWRSELYKYKVVKIDPLGVAPTKAKRRVVQREKRAVGIGALFLGFLGAAGSTMGAASMTLTVQARQSLSGIVHQQNNLLRAIEAQQHLLQLTVWGIKQLQARILAVERYLKDQQLLGIWGCSGKLICTTAVPWNASWSNKSLEQIWNNMTWMEWDREINNYTSLIHSLIEESQNQQEENEQELLELDKWASLWNWFNITNWLWYIKLFIIIVGGLVGLRIVFAVVSIVNRVRQGYSLLSFQTHLPIPRGPDRPEGIEEEGGERDRGRSIRLVNGSLALIWDDLRSLCLFSYHRLRDLLLIVTRIVELLGRRGWEALKYWWNLLQYWSQELKNSAVNLLNATAIAVAEGKDRVIEVLQAAYRAIRHIPRRIRQGLERILL

SEQ ID NO: 217 - protein, 849 aa, Artificial Sequence
  Description of Artificial Sequence: Synthetic polypeptide
MIVMGIKKNYQHLWTWGMMLLGMLMICSTAPSLWVTVYYGVPVWKEATTTLFCASDAKAYEKEAHNIWATHACVPTDPNPQEVVLENVTEDFNMWKNNMVEQMHEDIISLWDQSLKPCVKLTPLCVTLNCTDPWYDNTANRTTERMIMEKGEIKKCSIEVNTCLIDVWMEHCALLSKLHLVRLENTTFIYMQTSRHSSKRTKGCPRYSIEPIPLQYSAPAGSAILIRKNDMVHGTGTCTHVPPVQCSNGIRPVVSSQHPSHDISGAAVLTKDNFKDTVRTIIVQLNDSVPINCTRPNNNTRKSIHIGPGRAFYATGDIIGDIRQAHCNISLVKWNNTLEKIVTKLREQFKNKTIVFSPPSGGDPEIVSHSFNCGGEFFYCNSTPLFNSTWDTNGTCKGSNSADWNVTVPCISIPITTMGQKLEQAMDVRPIAGKAICSSSLSKGILLANSHNSIIVPRLVMPKGKDKKFNWNRKMYQCQVQCQIEPLGVAPTMAKRRVVQREKRDLGLGALFLGFLGAAGSTMGAASITLTVQARQLLSGIVQQQNNLLRAIEAQQHLLQLTVWGIKQLQARVLAVERYLKDQQLLGIWGCSGKLICTTTVPWNISWSNKTLEQIWDNMTWMQWDKEIHNYTELIYTLIEESQIQQEKNEQELLELDKWSNLWNWFDITNWLWYIKIFIMIVGGLIGLRIVFVVLSIINRVRKGYSPLSFQTLLPVPRGPDRRFPIGEGDGERDRDRDSRSANGLLAIINVDMRILSLCIFLYRRDLLLIVMMTVELLGRRGWETLIYCLNLNLYLSQNLKHKAISIINVTATAVAVAADTVIDTVPAAGRGILLILRRIRQGLERDLL

SEQ ID NO: 218 - protein, 859 aa, Artificial Sequence
  Description of Artificial Sequence: Synthetic polypeptide
MRVKGIRKNWQHWWWKWGIMLLGMWMICSTEEEKLWVTVYYGVPVWKEASTTLFCASDAKAHKTEVHNVWATHACVPIDPDPQEVRLENVTENFNMWKNDMVEQMHEDIISLWDQSLKPCVKLTPLCVTLNCSSNVTIITNSTTANSSGKGIRDELEMKNCSFNVSTNTNRKGFKEEYALFYKLDLNGTDNTSYTLINCDSSVIKQACPKVTFEPIPIHYCTPAGFAILQCNDKKFNGTGPCSNVSTVQCTHGIRPVVSTQLLLNGSLAEEEIVIRSENLTDNAKNIIVQLNASVEINCTRPNNNTRKGIGIGPGSIFYATGAIIGDIRQAHCNISRAKWNNTLRQLAGELEKRFNKTTIIFEQPLPGGDQEIVMHSFNCGGEFFYCNTSQLFNNTWNSTDKTLNNTEGNDTITLPCRIRQIINRWQEVGKAMYAPPIAGIITCSSNITGLILTRDGGTENGTNTTTETFRPGGGNMKDNWRSELYKYKVVRIEPLGIAPTRARRIVVQREKRAVGTIGAMFLGFLGAAGSTMGAASVTLTVQARLLLSGIVQQQNNLLRAIEAQQRMLQLTVWGIKQLQARVLAVERYLKDQQLLGIWGCSGKLICTTNVPWNTSWSNKSMNDIWNNMTWMEWDREINNYTGLIQTLLEESQIQQEKNEQELLELDKWTSLWNWFDITKWLWYIRIFIMVVGGLVGLRIIFFVLSIVNRVRQGYSPLSLQTHLPSPRGPDRPGGTEGEGGEEDRGGSGRSVNGFLALIWVDLRSLLLFSYRHLRDLLLILARSVELLGLRRWEALKYCWNLLQYWSQELKNSAVSLLNAIAIAVAEGTDRIIEFLQGVFRAFIHIPRRIRQGLERALL

SEQ ID NO: 219 - protein, 823 aa, Artificial Sequence
  Description of Artificial Sequence: Synthetic polypeptide
MRVKGIMKNYQHWWRWGMMLLGMWMICSANKSWVTVYYGVPVWKEATTTLFCASDAKAYDTEVHNVWATHACVPIDPNPQEVVLGNVTENFNMWKNNMVDQMHEDIISLWDQSLKPCVKITPLCVTLNCSNLKNETANSTSANSNETANSTTASNSTSNSSGEVMEEVDMKNCSFTVTTELKNTVSKQYALFYKCKPYLKNGTGPCSNVSTVQCTHGIRPVVSTQLLLNGSLAEEEVVIRSENFTNNAKNIIVQLNASVEINCTRPDNTIKNIRIGPGIGLGSTLHATKSITGRIRPHCNISEAKWNNTLKQIAIKLREQFRNKTIIFNHSSGGDPEIEMHSFNCGGEFFYCNTTKLFDSTWNGTKEWNDTKESDKNITLQCRIKQIINRWQEVGQAMYAPPISGLIRCSSNITGLILTRDGGANETHTNTETFRPAGGDMKDNWRSELYKYKVVRIEPLGIAPTKARRRVVQREKRAVGILGAMFLGFLGAAGSTMGAASMTLTVQARQLLSGIVQQQNNLLRAIDAQQHLLRLTVWGIKQLQARVLAVERYLKDQQLLGIWGCSGKLICTTNVPWNTSWSNKTQEDIWTNLTWMQWEREIDNYTNVIYSLLEESQNQQEKNEQELLQLDKWASLWNWFDITSWLWYIKIFIMIVGGLIGLRIIFTVLSIVNRVRQGYSPLSFQTHFPSPRGPDRPGEIEGEGGEEDRGGSDRLVTGFLTLVWVDLRNLCLFSYRSLRDLILIVARSVELLGLRGWEVLKYCWSLLQYWSQELKKSAVSLLQATARAVVEGTDRVIETLQRAYRAILHIPRRIRQGLERALL

SEQ ID NO: 220 - protein, 892 aa, Artificial Sequence
  Description of Artificial Sequence: Synthetic polypeptide
MRVKGIRRNWQHWWRWGTMLLGILMICSATDLWVTVYYGVPVWKEANTTLFCASDAKAYDTEVHNVWATHACVPTDPSPQEVELKNVTEDFNMWKNNMVEQMHEDIISLWDQSLKPCVKLTPLCVTLNCTDWNGTATSPNDNSYRGNKMEKGEMKNCSFNITTGIRDKIQKEYALFYKLDMVPIDDDKTNSSPTTTTSSTLTSSSVTNSNSNSSNTTSNSSQYRNYRMISCNTSVITQACPKVSFEPIPIHYCAPAGFAILKCNDKNFTGKGPCSNVSTVQCTHGIRPVVSTQLLLNGSLAEEGIVIRSDNFSNNAKNILVQLKEAVVINCTRPNNNTRRGIHIGPGRAFYTTGDVIGDIRQAHCNISGTKWNNTLYQIAKKLKEQYNETNKIIFNHSSGGDPEIVMHSFNCGGEFFYCNTAKLFNSTLNNTEWSNITAENNEDKIILQCRIKQIINMWQEVGKAMYAPPISGPINCSSSITGLILTRDGGNINNNSMRDNDTFRPGGGDMRDNWRSELYKYKVVRIEPLGVAPTKAKRRVVQREKRAVGIGAVLLGFLGAAGSTMGAASVMLTVQARQLLSGIVQQQNNLLRAIEAQQHLLQLTVWGIKQLQARVLAIERYLQDQQLLGIWGCSGRLICTTAVPWNASWSNRSLDQIWNNMTWMEWEREIDNYTNIIYSLIQESQNQQDKNEQELLELDKWASLWNWFSITQWLWYIKIFIMIVGGLIGLRIVFAVLSIVNRVRQGYSPLSLQTLLPAPRGPDRPEGTEEEGGERDRDRSGQLADGLLTLIWVDLRSLCLFSYHRLRDLLLIVARIVELLGRRGWEALKYWWNLLQYWGREIKNSAVSLLNATAIAVAEGTDRVLELLQRIGRGILHIPRRIRQGLERSLL

SEQ ID NO: 221 - protein, 874 aa, Artificial Sequence
  Description of Artificial Sequence: Synthetic polypeptide
MRVKGIRRNYQHLWWKWGIMLLGTLMIYSAAEQWWVTVYYGVPVWKEANTTLFCASDAKAYDTEVHNVWATHACVPTDPSPQEINMTNVTEYFNMWKNNMVDQMHEDIINLWDQSLKPCVELTPLCVTLECTDNITTSSNTTRGSNSSNRSRWENMTIETGEIKKCSFNVTTGIRDRVNTEYAYFNRFDIVQTERDNKSYTLRHCNTSVIKQACPKISFEPIPIYYCAPAGFAILKCNNKTFSGKGECDNVSTVQCTHGIRPVVSTQLLLNGSLAEEGVVIRSDNFSDNAKTIIVQLTKAVQINCTRPNNNTRKGIHMGPGKAFFTTGQIIGDIRQAYCNISHTKWNNTLKQVVYQLRKQYGGNKTINFTQPSGGDLEIVTHSFNCGGEFFYCNTTQLFNTTWYNNETVDNKTWTEDDTNLTDKDIIILPCRIKQIINMWQKVGKAMYAPPIQGMISCSSNITGLLLTRDGGNDTDTDPNGTETFRPIGGDMRDNWRSELYKYKVVRIEPLGIAPSKAKRRVVQREKRAALGAVFLGFLGAAGSTMGAASITLTVQARQLLSGIVQQQSRLLRAIEAQQHMLQLTVWGIKQLQARVLALERYLQDQQILGIWGCSGKLICTTSVPWNASWGNTSLGYDYIWTNWTWMKWEKEIANYTHIIYDLLEESQIQQEQNELELMKLDKWASLWDWLGITKWMKYIKIFIIIVVGLVGLRIIFAVLSIVNRVRQGYSPLSFQIRPPAAREPDRPEEIEEGGGGRDRGRSNQLVDGFLALIWVDLWSLCLFSYQRLRDLLLIVTRIVELLGRRGWEILKYWWSLLQYWGQELKKSAVSLLNATAIAVAEGTDRIIEAAQRVFRAIIHIPRRIRQGLERALL

SEQ ID NO: 222 - protein, 862 aa, Artificial Sequence
  Description of Artificial Sequence: Synthetic polypeptide
MRVKGIRKNCQHWWRWGIMLLGMWMICSAATGGLWVTVYYGVPVWREAITTLFCASDAKAYETEMHNVWATHACVPIDPNPLEVDLPNVTENFNMWKNNMVEQMHEDIISLWDQSLKPCVKITPLCVVLNCSDAKNSTSTNNSTEKVMEKGEMKNCSFNVTTNIENKVKEARAIFDKLDVVQIDDNDTNTMIGIQYYKCYSSSITQACPMVSFEPIPIHYCTPAGFAILQCKDKKFNGTGPCTNVSTVQCTHGIRPVVSTQLLLNGSLAEEEIVIRSENFTNNAKTIIVQLNASVEINCTRPNNNTRKSIPIGPGRAFYATGDIIGDIRRAHCNISKATWNNTLRQLAIKLREQLEDNTTTIIFKNSSGGDPEIEAHSFNCREEFFYCNTTPLFNSIWYSNNTEKSYNTAENDTITLQCRIRQIIKRWQEVGKARYAPLITCLIRCYSNITGLLLAGDGGEAGKDNGNKNETFRPGGGDMRDNWRSELYKYKVVEIEPLRIAPTRARRIVVQREKRAVGTLGAMFLGFLGAAGSTMGAASLTLTVQAKQVLSGIVRQQNNLLRAIEAQQRLLQLTVWGIKQLQARVLAVERYLQDQRLLGIWGCSGKLICTTSVPWNTSWSNKSHDEIWNNMTWMEWDREINNYTQVIYDLLEESQIQQEKNEQELLKLDSWASLWKWLDISNWLWYIQIFMMMVGGLVGLRIILCVLSVVNRVRQGYSPLPFQTHLPSPRGLDRPGGIEGEGGEGDRSGSSGLAGGFLTLVWVDLRSLCLFSYHSLRDLLLIVARSVELLGLRGWEILKYWWSLLQYWSQELKKSAVSLLNATAIAVAEGTDRVIEILQRIYRAILHIPTRIRQGLERALL

SEQ ID NO: 223 - protein, 864 aa, Artificial Sequence
  Description of Artificial Sequence: Synthetic polypeptide
VRGTRKNYHHYLWRWGTMLLGMLMICSAGEQLWVTVYYGVPVWKEATTTLFCASDAKSYDTEVHNMWATHACVPTDPNPQEVVLGNVTENFNMWKNNMVEQMHEDIISLWDQSLKPCVKLTPLCVTLNCTDNLDNGTISNATHTTNSSSVNNTTGNSTRKLEIDRGEIKNCSFNITTNIKDKMQKAHALFYKLDVVPIDNSTTSYRLISCNTSVITQACPKVSFEPIPIHFCAPAGFAILKCNNKTFNGKGPCKNVSTVQCTHGIRPVVSTQLLLNGSLAEDEVVIRSENFTDNAKTIIVHLNESVEINCTRPNNKTKRSFHIGPGRAFLTEIVGDIRQAYCNISRAKWNNTLHQVVNKLREQFGNRTIVFKNSSGGDPEIVTHMFNCAGEFFYCNTTKLFNSIWMPNGTWNSTDTSNSTEIRLPCRIKQIVNMWQEVGKAMYAPPISGRIRCVSNITGLLLTRDGGNNNETTEIFRPGGGDMRDNWRSELYKYKLIKIEPLGIAPTKAKRRVVQREKRAVGIGAVLLGFLGAAGSTMGAASLTLTVQARLLLSGIVQQQNNLLRAIEAQQHMLQLTVWGIKQLQARILAVERYLRDQQLLGIWGCSGKLICPTTVPWNASWSNKNLSQIWDNMTWMEWEREIDNYTSLIYTLIEESQNQQEKNEQDLLELDKWASLWNWFSITNWLWYIKIFIIIVGGLIGLRMVFTVLSIVNRVRQGYSPLSFQTRHPAPRGPDRPEGIEEEGGERDRDTSGFLVDGFLAIIWVDLRSLCLFSYHRLRDLLLIVARIVELLGRRGWEALKYWWNLLQYWGKELKSSAISLFNATAIAVAEGTDRVIEVIQRACRAILHIPRRIRQGLERALQ

SEQ ID NO: 224 - protein, 855 aa, Artificial Sequence
  Description of Artificial Sequence: Synthetic polypeptide
MRAKGIRKNCQHWWRGVTLLLGMLMICNAAQQLWVTVYYGVPVWRDADTILFCASDAKGYDTEVHNVWATHACVPTDPNPQEIRLENVTENFNMWKNKMVEQMHEDIISLWDQSLKPCVKLTPLCVTLNCTDLNKNSTQGNATAEEQEEIRNCSFNITTSIRDRMKKDYALFYSNDIVKLDNNTFRLTSCNTSVITQACPKISFNPIPIHYCAPAGFAILKCKDTTFNGSGLCRNVSSVQCTHGIKPVVSTHFLLNGSLAEKEVVIRSENFTDNAKTIIVQLKDPVRINCTRPNNNTRKGIHIGPGRAFYATGDIIGDIRQAHCNISRTEWNKTLNQVVEKLRAQFNNKTIVFKNASGGDPEIVMHIFNCRGEFFYCNTTQLFNSTWNANSTWNDTSSNIGESNDTITLPCKIRQIVNMWQEVGKAMYAPPIAGQLNCSSNITGILLTRDGGESNTTNSNETFRPGGGNMRDNWRSKLYKYKVIKIEPLGLAPTKAKRRVVQRKARAAGLGAVIFGFLGAAGSTMGAASVALTVQARQLLSGIVQQQNNLLRAIEAQQHMLQLTVWGIKQLQARVLAVERYLRDQQLLGIWGCSGKLICTTAVPWNDSWSPRWSKENMSKIWDNMTWNQWEREIDNYTGYIYTLLEESQNQQEKNEQDLLSLDKWADLWSWFDITNWLWYIKIFIMIVGGLVGLRIIFSVLAIVNRVRQGYSPLSFQTHLPARRGPEGPEEIEEGGGERDRDRSRPLVDGFLTLIWIDLRSLCLFSYHRLRDLLLIVTRTLELLGRRGWEALKYCWNLLQYWGQELRSSAVSLFNATAIAVAEGTDRIIEIIQRIFRAYSFSAPTLKNDMALALG

SEQ ID NO: 225 - protein, 850 aa, Artificial Sequence
  Description of Artificial Sequence: Synthetic polypeptide
MRVKEIRKNYQHLWRWGTMLLGILMICSAAEKLWVTVYYGVPVWKEATTTLFCASDAKAYDTEVHNVWATHACVPTDPNPQEVVLENVTENFNMWKNNMVEQMHEDIISLWDQSLKPCVKLTPLCVTLNCTDLRNATNTTSSSGGTMERGEIKNCSFNITTSIRDKVQKEYALFYKLDVVPIDNDNTTTSYRLISCNTSVITQACPKVSFEPIPIHYCTPAGFAILKCKDKKFNGTGPCTNVSTVQCTHGIRPVVSTQLLLNGSLAEEEVVIRSDNFTDNAKTIIVQLKESVEINCTRPNNNTRKSIHIGPGRAFYTTGEIIGDIRQAHCNLSRAKWDNTLKQIVRKLREQFGNKTIVFNQSSGGDPEIVTHSFNCGGEFFYCDSTQLFNSTWNVTEGSNNTEGNITLTLPCRIKQIINMWQEVGKAMYAPPIRGQIRCSSNITGLLLTRDGGNNESETEIFRPGGGDMRDNWRSELYKYKVVKIEPLGVAPTKAKRRVVQREKRAVGIGAVFLGFLGAAGSTMGAASMTLTVQARLLLSGIVQQQNNLLRAIEAQQHLLQLTVWGIKQLQARVLAVERYLKDQQLLGIWGCSGKLICTTTVPWNASWSNKSLDKIWNNMTWMEWEREINNYTSLIYTLIEESQNQQEKNEQELLELDKWASLWNWFDITKWLWYIKIFIMIVGGLVGLRIVFAVLSIVNRVRQGYSPLSFQTRLPAPRGPDRPEGIEEEGGERDRDRSGRLVDGFLALFWVDLRSLCLFSYHRLRDLLLIVTRIVELLGRRGWEVLKYWWNLLQYWSQELKNSAVSLLNATAIAVAEGTDRVIEVLQRTCRAILHIPTRIRQGLERALL

SEQ ID NO: 226 - protein, 920 aa, Artificial Sequence
  Description of Artificial Sequence: Synthetic polypeptide
MRVKEMRKHWQHLWTGGILLLGMLMICSTAQDAWVTVYYGVPVWKEATTTLFCASDAKAYKTEVHNVWATHACVPTDPNPQEVVLENVTENFNMWKNNMVEQMHEDIISLWDESLKPCVKLTPLCVTLNCTDELIVTNSTNGNNTNSHSTRGNDTIGNSTSWKEMKGEIKNCSFNIPTSVKDKMQKQYALFYKLDVVAINDDNNKNSSNYNSSKLSSSNSNCKSDNNSSCNCSSSNNNCSSSNHSSNYSSYILISCNTSTLTQACPKVSFEPIPIHYCTPAGFAILKCNDKRFNGTGPCKNVSTVQCTHGIRPVVSTQLLLNGSLAEEEVVIRSENISNNAKTIIVQLNESVAINCTRPNNNTRKGIRIGPGRTFYAAEKIIGDIRKAYCIINGTKWNETLRLIVAKLREQEQIGENTTIIFKPSSGGDPEIENHIFNCRGEFFYCNTTQLFNSTWYSNGTWIGKNFTGSNITLPCRIKQIVNMWQEVGKAMYAPPIRGQINCISNITGLLLTSDGGFRKTNETTNMTETLRPGGGDMRDNWRSELYKYKVVRIEPLGIAPTQAKRRVVQREKRAVGIIGAVFLGFLGAAGSTMGAAALTLTVQARQLLSGIVQQQNNLLRAIEAQHQLLQLTVWGIKQLQARILAVERYLRDQQLLGIWGCSGKLICTTTVPWNTSWSNKSLTEIWNNMTWMEWEREIENYTGLIYNLLEKSQNQQEKNEQELLELDKWANLWNWFDITNWLWYIRIFIMIVGGLIGLRIVFAVLSIVNRVRQGYSPISLQTHLPVPRGPDRPEGIEGEGGERDGDTSRRLVIGLLPLIWDDLRSLCLFSYHRLRDLLLIVARIVELLGRRGWEILKYWWNLLQYWSQELKNSAVSLLNATAIAVAEGTDRIIEIARTIFRAFYHIPRRIRQGFERALL

SEQ ID NO: 227 - protein, 869 aa, Artificial Sequence
  Description of Artificial Sequence: Synthetic polypeptide
MRVKETQMNWPNLWKWGTLILGLVIICSASDKLWVTVYYGVPVWRDADTTLFCASDAKAHVTEVHNVWATHACVPTDPNPQEIHLENVTEYFNMWKNNMVEQMHEDIISLWDQGLKPCVKLTPLCVTLTCTNASLTKINTTTSDPKIGNITDEVRNCSFNVTTEIEDKKQRVSALFYKLDIVPMEDNSNSSEYRLINCNTSVIKQACPKVSFDPIPIHYCTPAGYAILKCNDKNFTGTGQCKNVSSVQCTHGIRPTVSTQLLLNGSLAEEEIMIRTESLTNNAKTIIVHLNKSVEINCTRPSNNTRTSITIGPGRVFYRTGDIIGDIRRAYCEINETNWYKVLKQVTGKLKEHFNKTINFGPPSGGDLEITMHHFTCRGEFFYCNTTKLFINNCTRNETKGGCNSTINGTIILPCRIKQIINMWQGAGQAMYAPPISGRINCVSNITGILLTRDGGITSNGTNGTNGTNGTETFRPGGGDIRDNWRSELYKYKVVQIEPLGVAPTKARRRVVEREKRAVGIGAMIFGFLGAAGSTMGAASITLTVQARQLLSGIVQQQSNLLRAIEAQQHLLQLTVWGIKQLQARVLAVERYLKDQKFLGLWGCSGKIICTTAVPWNSSWSNKSYDQIWHNMTWIEWEREISNYTNQIYEILTESQNQQDRNEKDLLELDKWASLWNWFDITRWLWYIKIFIMIVGGLIGLRIIFAVLSIVNRVRQGYSPLSFQTPTLHQREPDRPERIEEGGGEQDRDRSVRLVSGFLALAWDDLRSLCLFSYHRLRDFISIAARTVELLGHSSLKGLRLGWEGLKYLGNLLLYWGQELKISAISLLDATAIAVAGWTDRVIEGAQRAWRAFLHIPRRIRQGLERALQ

SEQ ID NO: 228 - protein, 860 aa, Artificial Sequence
  Description of Artificial Sequence: Synthetic polypeptide
MKVRVIRMSYQQLWKGGTLLLGMLMICSAVGPLWVTVYYGVPVWKEANTTLFCASDAKAYDTEAHNVWATHACVPTDPDPREVVLENLTEDFNMWKNDMVEQMHQDIISLWDQSLKPCVKLTPLCVTLNCSDFNGTVTNNSSGNATDNSSGSGLERETTGEIKNCSFNITTDMKDKVQEKYALFYKLDIVSIDESRNGSSYRLTSCNTSVLTQACPKVSFEPIPIHFCAPAGFAILKCNNKRFNGAGPCTNVSTVQCTHGIRPVVSTQLLLNGSLAEEKVIIRSKNFSDNTKIIIVQLNESVVINCTRPNNNTRKSIHIGPGRAFYGTEIIGDIRKAHCTLNRTQWNNTLQRVATELREQFKNKTIGFTNSSGGDLEITMHSFNCGGEFFFCNTTKLFGGTWDGSTWNWSDNENNTITITLPCRKKLIINMQQEEEKATYANTIRGPIKSASNITGLLKTRDGGEEDNASETFRPGGGDMRDNWRSELYKYKVVKVVPLGVAPTRAKRRVVQREKDLGLGALFLGFLGAAGSTMGAASLTLTVQARQLLSGIVQQQNNLLRAIEAQHQLLQLTVWGIKQLQARVLAVERYLRDQQLLGIWGCSGKLICTTSVPWNASWSNKSLDDIWNNMTWMQWEKEIENYTVEIYKLIGEAQNQQEKNEKDLLELDNWASLWNWFSITNWLWYIKIFIMIIGGLIGLRIVFAVLSIVKKVRQGYSPLSLQTRLPTQRGPDRPEGIEEEGGEQDRGSSIRLVDGFLALIWDDLGSLGPFSYPRLEDLPPIVTRIGELLGRRGWELLKLWWSLLQYWSQELKKSAVSLLNATAIAVAEGTDRILEVVQRFCRAILHIPVRIRQGLERALL

SEQ ID NO: 229 - protein, 875 aa, Artificial Sequence
  Description of Artificial Sequence: Synthetic polypeptide
MRVKGIRKNYQRLWRWGTMLLGMLMICTATGKLWVTVYYGVPVWKEATTTLFCASDAKSYDTEAHNVWATHACVPTDPNPQELELKNVTEEFNMWKNNMVEQMQEDIISLWDQSIKPCVKLTPLCVTLNCTGLRNNTNATSASSTHPPTTSSSSRNIMEGEMANCSFNITTTMNKVQKEYALFYTHDVVQIVDNDNNNASNSAKKRISYRLISCNTSVVTQACPKVNFEPIPIHYCAPAGFAILKCNEKEFSGKGPCKNVSTVQSTHGIRPVVSTQLLLNGSLAEKEIVIRSENFTDNTKTIIVQLNEPVKIECTRPNNNTRESITMGPGKAFYATGDIIGNIRKAYCTLRGTEWTNTLKRIAEKLGEKFENKTIKFTQSSGGDPEIVAHSFNCGGEFFYCETTQLFNSTWIRDNGNWTRAENITEGNNITLPCRIRQIVNLWQQVGKAMYAPPISGPINCLSNITGLLLTWDGGNNSTSNNNTEIFRPGGGDMRDNWRSELYKYKVVKIEPLGVAPTKAKRRVVQREKRAVGLGALFLGFLGTAGSTMGAASLTLTVQARQLLSGIVQQQNNLLRAIEAQQHLLQLTVWGIKQLQARVLAVERYLKDQQLLGIWGCSGKLICTTAVPWNASWSNKSLNDIWDNMTWMQWEREIINYTGLIYTLLVESQIQQEKNVQELLELDTWASLWNWFNITNWLWYIKLFIMIVGGLIGLRIVFTVLSIVNTVTQGYSPLSFQTRLPSQEGTDRPEGIQEGGGETDRSGPIRLVDGFLAFIWVDLRSLCLFSYHRLRDLLLIVTRTVELLGRRGWELLNYLWNLLQYWSQELLNTAQRLFNTTAIVVAEGTDRVIEVVQRAYRAILHIPTRIRQGLERLLL

SEQ ID NO: 230 - protein, 832 aa, Artificial Sequence
  Description of Artificial Sequence: Synthetic polypeptide
MRVKGIRKNCQHLWKWGTMLLGMLIICSAAEQLVTVYYGVPVKEATTTLFCASDAKAYNTEVHNVWATHACVPTNPNPQKVVLKNVTKNFNMKNNMVKQMHKNIISLWDQSLKPCVKLTPLCVTLNCTDYLKNNTNTTSSSEKEMKGGKIKNCSFNITTKIENKVQKKYALFYKLNVVPINNTTTSYRLISCNTSVITQACPKVSFKPIPIHYCTPAGFALLKCKNKKFNETGPCTNVSTVQCTHGIKPVVSTQLLLNKSLAEKKVVIKSKNFTDNAKTIIVQLNKSVKINCTKPNNNTRKSIHIGPGQALYATEAIIENIRQAHCNISKAKNNTLKQIVKKLKVQFRNKTIIFNQSSGGDPKIVMHSFNCGGEFFYCNTTKLFNSTMFNNTNNTKNTKENGTITLPCRIKQIINRWQKVRKAMYAPPIRGQIKCSSNITGILLTKNGSTNNSTNKTFRPKEENIRNNKSKLYKYKVVKIKPLKVAPTKAKRRVVQREKKAVETKALFLGFLRAAGSTMGAAAVTLTVQARQLLSGIVQQQNNLLRAIKAQQHLLQLTVGIKQLQAKVLAVKKYLRNQQLLGIGCSEKLICTTTVPNASSNKSLNKINNITMKKKKINNYTSLIYSLIKKSQNQQVKNRQKLLKLNKASLSFNITKWLWYIKIFIIIVKGLIGLKIVFLVLSIVNKVRQKYSPLSFQTRFPAPKEPDRPEGIEEKGKKDKDRSGQLVNKFLTLIINLRSLCLFSYHRLKNLLLIVAKIVKLLKRRGWEALKYWWNLLQYSQKLKNSAVSLLNATAIAVAEGTDRVIEVVQRTCRAILHIPARIRQGLERALL

SEQ ID NO: 231 - protein, 864 aa, Artificial Sequence
  Description of Artificial Sequence: Synthetic polypeptide
MRAKEMRKHWQQWWKGGILLLGMLMICSTAENLWVTVYYGVPVWKEATTTLFCASDAKAYDTEAHNVWATHACVPTDPNPQEVFLKNVTENFNMGKNNMVEQMHEDIISLWDQSLKPCVKLTPLCVTLNCTDNIKLKNATENATATKANKEEIINCSFLVTTDRKDKEQNEYALFYRLDICTNKSWLLLVYTNNTDYRLDSCNTSVITPSGPRRCPCESISIHPCTLDDCAIFKCNEKKCNGTGVCKTVSTVHCIHGLSAVGSSPLLLNGSLAEEEVVIRSENFTNNAKTIIVQLKEAVTINCTRPNNNTRKGIHIGPGRAFYATESIIGDIRQAHCNLSRAQWNNTLRQIVQKLKEQFKNATTIKFNSSSGGDPEIVTHSFNCGGEFLYCNTSHLFNSTWMCNSTWNSTNTEGNNTITLPCRIKQIVNMWQEVGKAMYAPPIKGQIKCLSNITGLLLTRDGGVGDDSSNDTEIFRPGGGDMRDNWRSELYKYKVVRIEPLGIAPTKAKRRVVQREKRAVGTLGAMFLGFLGAAGSTMGAASVTLTVQARQLLSGIVQQQNNLLRAIEAQQHLLQLTVWGIKQLQARVLAVERYLWDQQLLGIWGCSGKLICPTTVPWNTSWSNKNYTEIWNKMTWMQWEREIDNYTSLIYSLIEESQNQQEKNEQELLELDKWDSLWSWFSITHWLWYIKIFIMIVGGLVGLRIVFTVLSIVNRVRQGYSPLSFQTHLPAQRGPDRPEGIEEEGGERDRERSTRLVHGLLALIWDDLRSLCLFSYHRLRDLLLIVARTVELLGRRGWEALKYLWNLLQYWIQELKKSAISLLNATAIAVAEGTDRIIEIAQRIFRAFLHIPRRIRQGFERALQ

SEQ ID NO: 232 - protein, 874 aa, Artificial Sequence
  Description of Artificial Sequence: Synthetic polypeptide
MKVTGIRRNYQKFWRWGALLLGMLMISSAAEKLWVTVYYGVPVWKDANTTLFCASDAKGYKTEAHNVWATHACVPTDPNPQEVVLANLTENFNMWESDMVEQMHEDVINLWDQSLKPCVKLTPLCVTLNCTNLNITSNNTSSSNTSSSNTSSITGGGEMKNCSFNITTSINTKVKDYAFFYNLDIVQINNDKTSDNTSYRLINCNTSVITQACPKISFEPIPIHYCTPAGFAIIKCNNETFNGTGPCTNVSIVQCTHGIRPVVSTQLLLNGSLAERDVAIRSKNFSNNAENIIVQLNEAVQINCTRPNNNTRKSINIGPGRAWYTTGEIIGNIRQAHCNISGSKWNDTLKQVVKKLREQFKNKTITFEQPPPGGDPEIVMHNFNCGGEFFYCNTSQLFNSRWDDVDENETSTSNGTTGNDTITLPCRIKQIINMWQEVGKAMYAPPIAGLIRCSSNITGLLLTRDGGNINATGNNTNKNNNTEIFRPAGGNMKDNWRSELYRYKVVKVEPLGVAPTRAQRRVVQREKRAVGMIGAMFLGFLGTAGSTMGAASLTLTVQARQLLSGIVQQQRNLLRAIEAQQHLLQLTVWGIKQLQARVLAVERYLKDQQLLGLWGCSGKLICTTNVPWSGNWSSKSYNDIWYNMTWMQWEKEIENYTGVIYTLIEESQNQQEKNEQELLELDKWASLWNWFDISNWLWYIRIFIMIVGGLIGLRIIFAVLSIVNRVRQGYSPLSLQTHFPTQRGPGRPEGTEEEGGERDRDRSERLVTGFLTLFWEDLRSLCLFSYHRLRDLLLIVARIVELLGRRGWEVLRYWWNLLQYWIQELKNSAISLLNAIAIAVGEGTDRVIEVAQRIYRAILNIPRRIRQGLERALL

SEQ ID NO: 233 - protein, 865 aa, Artificial Sequence
  Description of Artificial Sequence: Synthetic polypeptide
MRVKGIRKNCQHSWKWGIMLLGMLMICNASDQLWVTVYYGVPVWKEANTTLFCASDAKAYDTEVHNVWATHACVPTDPNPQEIGLGNVTENFNMWKNNMVEQMHEDIISLWDQSLKPCVKLTPLCVTLNCTDCKKDNDTLQCDCNNERLIIILSLVTYTWERGEIRNCSVTATTDIEDRRKNEDASYHNRGIIQINNINNTYTLMLSSCTTSIIAGPCPSVSLDPIPNCYCAAAGFPIRNGNDNNVAGPGPSDIVTPGPCALGIMPVAPPLLLVSGPLAEEEVITTSDIFTNNAKTIIVQLNETVKINCTRPSNNTRKSITIGPGRAFYATGDIIGDIRQAHCNISQAKWNNTLKQVVVKLREQFGMNKTIIFNQSSGGDPEIVMHSFNCGGEFFYCNTTRLFNTTWNNTEKSNPTEGNGTITLQCRIKQIINLWQEVGKAMYAPPIRGQINCSSNITGLLLTTDGGMNTSNNKTFIPAGGDMRDYWRSGVLKYDVVIVEPLGIAPTTDMRRVVQIQKRAELLRALLLVFLGAAGRTMSAASMTLTVQARQLLSGIVQQQNNLLQAIEAQQHMLKLTVWGIKQLQARILAVERYLQDQQFLGFWGCSGKRICTTAVPWNASWSNKSLDEIWNNMTWMEWEKEIDNYTGLIYNLLIESQNQQEKNEQELLALDKWASLWNWFDISNWLWYIRIFIMIVGGLVGLRIVFTVLSIVRRVRQRYSPISVQTPRSAAQRGHDRPDGIEEEGGERDRDRFDQSVNGFLTIIWVDVRSLCLFSYHRLRDLLSIVSRIVELMGRRGWGILKYWCNLLQYRSQELKKSAVSLFNATAIVVAEGTDRVIEAIQRAFRAILHIPRRIRQGAERALI

SEQ ID NO: 234 - protein, 861 aa, Artificial Sequence
  Description of Artificial Sequence: Synthetic polypeptide
MRVKGIKEELSSSWWKWGIMLLGMLMMICSALDQLWVTVYYGVPVWKEATTTLFCASDAKAYDTEVHNVWATHACVPTDPNPQEVVLENVTENFNMWKNNMVDQMHEDIISLWDQSLKPCVKLTPLCVTLNCTDLRNNTESNDTTSGMILGKDKIKMILFNCSFNITTSRRDKWQQEYAFFYKLDIMPIDEENNTNTYTLISCNTSVITQACPKVSFEPIPIHYCTPAGFALLKCNDKKFNGTGLCKNVSTVQCTHGIRPVVSTQLLLNGSLAEEEVVIRSENFTDNIKTIIVQLNESVEINCTRPNNNTRRSIRNHRGPGRAFHTTGEIIGNIRQAHCNISRAKWNNTLKQIVAKLREQFGKNKTIVFNHSSGGDPEIVMHSFNCGGEFFYCNTTQLFNSTWNITGGLNNTEGNGTITLQCKIKQFINMWHEVGKAMYAPPIRGQITCSSNITGLLLTRDGGENPGNDTDTFTPGGGDMKDNWSSELDKYRVIGIAPLPVAPTKAKTRLLQRDKRAVGIGSVFLVFLVAAGSTMSAMSMTMTLQAQELLYVTERMQKNLLKAIEAQQHLLQLTVWGIKQLQARVLAIEGYLKDQQLLGLWGCSGKLICTTAVPWNVSWSNKSLDKIWNNMTWREWEREIDNYTGLIYNLLETSQNQQEKNEQELLELDKWASLWNWFDITNWLWYIKIFIMIVGGLVGLRIVFTVLSIVNRVRQGYSPISLQTPRPAQRGLDRPEAWDEKAGEKCRGHFHRCVNRIMAIFGAICGAFCSSSFSCDPLGFYWGFWKFLPGGGKPLKNAWNFLPYLVPELNQGANEVFNCPVNATGESTGRGIETFQRTFKSIFQILSQITPGQTGAKKGWV

SEQ ID NO: 235 - protein, 847 aa, Artificial Sequence
  Description of Artificial Sequence: Synthetic polypeptide
MRVQENWQNLWKGGIWFLGIWMICSAVEQLWVTVYYGVPVWKDATTTLFCASNAKAYDTEVHNVWATHACVPTDPNPQEVVLQNVTEPFNVWKNGMVEQMHEDIISLWDQSLKPCVKLTPLCVTLHCTDLKETIKEEKGKMKNCSFNTTTSIRDKTQTAYALFSTLDLVQIKDGKINANSKHSYRIIHCNTSTITQACPKVSFEPIPIHYCAPAGFAILKCNDKQFNGTGECRNVSSVQCTHGIRPVVSTQLLLNGSLAEEDIVIRSENLTNNAKTIIVQLNETVRINCTRPNNIVSRRIHIGPGRTFHATKSITGSIKQAFCNLSRPQWEDTLGKIVKKLRQNFGTNTTIVFDHSSGGDPEIVKDRINCGGKFFYCYSIKLFKSTWNMEWSTQKASNTENENITLPCKIKQVINMWQEVGKAMYAPPIEGQIKCSSNITGLLLTRDGGKHNSSDTNKTEIFRPGGGDMRDNWRSELYKYKVVKIEPLGIAPTRAKRRVVQREKRAVGLGAMFLGFLGAAGSTMGAASLTLTVQARQLMSGIVQQQNNLLRAVEAQQHMLQLTVWGIKQLQARVLAVERYLKDQQLLGIWGCSGRLICTTAVPWNTSWSNRTQDDIWTNLTWMKWEKEIDNYTDVIYRLLEESQNQQEKNEQELLELDKWASLWSWFDITNWLWYIKIFIMIVGGLIGLKIVFTVFSIVNRVRQGYSPVLLQTHHPGRRGRPRPVGMEEEVGEGDRDSSCPLAVELLSIFEVVFRILFVFNCLRLRDLILIILRMVVLLGRGGWEIFKYWSRVLQFRIQELKNSGFILFPSTPITVEEETNGITEPFRSPCNPIVIIPIRKKQGSER

SEQ ID NO: 236 - protein, 850 aa, Artificial Sequence
  Description of Artificial Sequence: Synthetic polypeptide
MRVRGILRNCQQWWIWGILGFWMLMICNVVGNLWVTVYYGVPVWKEAKTTLFCASDAKAYEKEVHNVWATHACVPTDPNPQEMVLENVTENFNMWKNDMVDQMHEDIISLWDQSLKPCVKLTPLCVTLNCSNITSIVSRNVSNNDNMRNCSFNITTEIRDKEKKEYALFYRLDIIPLEKNSSEYRLINCNTSAVTQACPKVSFDPIPIHYCAPAGYAILKCNNKTFNGTGPCNNVSTVQCTHGIKPVVSTQLLLNGSLAEEEIVIRSKNLTDNAKIIIVQLKDPVTIVCTRPGNNTRKSVRIGPGQTFYATGEIIGNIRQAHCNISKEDWNKTLQQVGKKLAEHFPNKTIEFKEHSGGDLEITTHSFNCRGEFFYCYTSTLFNSTYNAEYNSNSTNSSSTITLQCRIKQIINMWQGVGRAIYAPPIEGNITCESNITGLLLTRDGGKDGNNTEIFRPGGGDMRDNWRSELYKYKVVEIKPLGIAPTKAKRRVVEREKRAVGIGAVFLGFLGAAGSTMGAASITLTVQARQLLSGIVQQQSNLLRAIEAQQHMLQLTVWGIKQLQARVLAIERYLKDQQLLGIWGCSGKLICTTAVPWNSSWSNRSQDDIWQNMTWMEWDREINNYTNTIYRLLEDSQNQQEKNEQDLLALDSWKNLWSWFNITNWLWYIKIFIMIVGGLIGLRIIFAVLSIVNRVRQGYSPLSFQTLIPNPRGPDRLRRIEEEGGEQDKDSSIRLVSGFLALAWDDLRSLCLFSYHRLRDFILIVVRAVELLGHSSLRGLQRGWEALKYLWSLVQYWGLELKKSAISLLDTIAIAVAEGTDRIIELVQRIFRAICNIPRRIRQGFEAALQ

SEQ ID NO: 237 - protein, 883 aa, Artificial Sequence
  Description of Artificial Sequence: Synthetic polypeptide
MRVRGTLRNCQQWWMWGVLGFWMLMICNGGKNLWVTVYYGVPVWKEAKTTLSCASDAKAYDTEVHNVWATHACVPTDPNPQEMVLENVTENFNMWKNDMVDQMHEDVISLWDQSLKPCVKLTPLCVTLECRDVTNGTSGNDTLANDTSECKNGTNNETYDESVKELRNCSFNATTLVRDKKKTAYALFYRLDIMPLNEKKNSSENSSEYVLINCNSSAITQACPKVTFDPIPIHYCAPAGYAILKCNNKTFNGTGPCNNVSTVQCTHGIKPVVSTQLLLNGSLAEGEIIVRSENLTNNVKTIIVHLNQSVEIVCTRPNNNTRKSIRIGPGQTFYATGEIIGDIRQAHCIINASNWHKTLQEVSKELAGYFPNKTIIFNSSSGGDLEITTHSFNCRGEFFYCNTSGLFNSTYMTNGTYMFNGTYRLNNITSNSNITIPCRIKQIINTWQEVGRAMYANPIAGNITCKSNITGLLLVRDGGTNNATTETFRPGGGNMRDNWRSELYKYKVVEIKPLGIAPTEAKRRVVEREKRAVGIGAVFLGFLGAAGSTMGAASITLTVQARQLLSGIVQQQSNLLRAIEAQQHMLQLTVWGIKQLQTRVLAIERYLKDQQLLGIWGCSGKLICTTAVPWNSSWSNKSHEEIWNNMTWMQWDREISNYTNTIYRLLEDSQNQQERNEKDLLALDSWKNLWSWFDITNWLWYIKIFIMIVGGLIGLRIIFAVLSIVNRVRQGYSPLPFQIRTPNPGGPDRLGRIEEEGGEQDKDRSIRLVSGFLALAWDDLRSLCLFSYHRLRDFILVAARVVELLGRSSLRGLQKGWEALKYLGSLVQYWGLELKKSATSLLDTIAIAVAEGTDRIIELGLSICRAIRHIPRRIRQGFEAALQ

SEQ ID NO: 238 - protein, 863 aa, Artificial Sequence
  Description of Artificial Sequence: Synthetic polypeptide
MRVRGIPRNWPQWWIWGILGFWIIMMCRVMGNLWVTVYYGVPVWKEAKTTLFCASDAKAYEKEVHNVWATHACVPTDPNPQEMELKNVTENFNMWKNDMVDQMHEDIISLWDQSLKPCVKLTPLCVTLNCTDVKKANNTTNIGNTTSNRNTTYNATYNEYMKNCSFNITTEIRDKKRKEYALFYRPDIVPLENSSSEYILINCNSSTITQACPKVSFDPIPIHYCAPAGYAILKCNNKTFNGTGPRHNVSTVQCTHGIKPVVSTQLLLNGSLAEEEIIIRSENLTDNTKTIIVHLNKSVAINCTRPGNNTRRSIRIGPGQAIYTNNIIGDIRQAYCSISKEKWNKTLEQVKEKLKEYYKKTIEFQQPVGGDLEITTHSFNCRGEFFYCDTTKLFSPKNETDNNTITLPCRIKQIINMWQEVGRAMYAPPIAGNITCNSNITGILLTRDGGDTHEKKRKHKRNKVTEIFRPAGGNMKDNWRSELYKYKVVEIKPLGVAPTGAKRRVVEREKRAVGMATMLFGFLGAAGSTMGAASITLTVQVRQLLSGIVQQQSNLLRAIEAQQHLLQLTVWGIKQLQARVLAIERFLQGQQLLGLWGCSGKLICTTNVPWNSSWSNKSEEDIWGNLTWMQWDREISNYTDIIYRLLEDSQTQQEQNEKDLLALDSWKNLWSWFDISNWLWYIRIFIIIVGGLIGLRIIFGVLSIVNRVRQGYSPLSFQTLTPNPRELDRLGRIEEEGGEQGRDRSIRLVSGFLTIAWDDLRSLCLFLYHQLRDFILIAARAAELLGRSSLRGLQRGWEALKYLGNIVQYWGLELKKSAISLLDTIAIAVAEGTDRIIRVIQSICRAIRNAPRRIRQGFEAALL

SEQ ID NO: 239 - protein, 856 aa, Artificial Sequence
  Description of Artificial Sequence: Synthetic polypeptide
MRVRGTLRNYQQWWTWGILGFWMLIIYSVAGNLWVTVYYGVPVWTNAKTTLFCASDAKAYEKEVHNVWATHACVPTDPHPQELVLANVTENFNMWKNDMVEQMHEDIINLWDESLKPCVKLTPLCVTLRCTKVNGTANATSEGTANATSKDEEMTMYNCSFNTTTGIRDKTQQEYALFHKHDVVPSNIDNSEYILIHCNTSTITQACPKVSFDPIPIHYCAPAGYAILKCNNKTFNGTGPCTNVSTVQCTHGIKPVVSTQLLLNGSLAEKEIIIRSENLTDNSKTIIVHLNESVDIVCTRPGNNTRRGIRIGPGQTFFATRTIGNIRQAHCNISESKWNTTLQRVSAKLKEYFNKTIIYNSSSGGDPEITTHSFNCRGEFFYCNTSRLFNRNSTDLSTNTGNNSTITLPCRIKQIINMWQGVGRAMYAPPIEGNITCKSIITGLLLVRDGGPNNSTETRPEPGREGNMKGNKFGRKSEIIIKYKVIENLSPLGEIHPTKAKRRAVEREKRAVVGIGAMILGFLGAAGSTMGAASITLTVHARQLLSGIVQQQSNLLRAIEAQQHMLQLTVWGIKQLQARVLAIERYLKDQRLLGLWGCSGKLICTTSVPWNSSWSNKSEADIWNNMTWMQWEKEINNYTYTIYQLLEDSQSQQEQNEKDLLELDKWQNLWSWFSITNWLWYIKIFIMIVGGLIGLRIIFAVLSIVNRVRQGYSPLSFQTLTPSPRELDRRERIEEEGGEQDRDRSVRLVSGFLSLAWDDLRSLCLFIYHRLRDFILIATRVVELLGQRGWEALKYLGNLVLYWGLEIKKSAINLLDTIAIAVAEGTDRIIEVVHRACRAIRYIPRRIRQDFEADLQ

SEQ ID NO: 240 - protein, 854 aa, Artificial Sequence
  Description of Artificial Sequence: Synthetic polypeptide
MRVRGIRRNYQQWWIWGVLGFWILMICNGGGNLWVTVYYGVPVWKEAKTTLFCASDAKAYEKEVHNVWATHACVPTDPDPQEMVLENVTENFNMWKNDMVNQMHEDVISLWDQSLKPCVKLTPLCVTLECRNVSTCNETYNESVKEIKNCSFNATTEIRDRKQTVYALFYRLDIVPLDKKNSSRNSSDYYRLINCNTSAITQACPKVTFDPIPIHYCTPAGYAILKCNDKTFNGTGPCHNVSTVQCTHGIKPVVSTQLLLNGSLAEREIIIRSENLTDNVKTIIVHLNESVDIVCTRPNNNTRKSIRIGPGQTFYATGDIIGDIRQAHCNISEDKWNETLQRVSKNLAEHFPNKTIKFASSSGGDLEITTHSFNCRGEFFYCNTSGLFNGTYMSNGTESNSSSIITIPCRIKQIINMWQEVGRTMYAPPIKGNITCKSNITGLLLVRDGGTEPNDTETFRPGGGDMRNNWRSELYKYKVVEIKPLGIAPTAAKRRVVEREKRAVGLGAVFLGFLGAAGSTMGAASITLTAQARQLLSGIVQQQSNLLRAIEAQQHLLQLTVWGIKQLQTRVLAIERYLRDQQLLGIWGCSGKLICTTAVPWNSSWSNRSEKEIWDNMTWMQWDREISNYTNTIYRLLEDSQNQQERNEKDLLALDSWKNLWSWFDITNWLWYIKIFIMIVGGLVGLRIIFAVLSIVNRVRQGYSPLSFQTLTPNSGGPDRLGRIEEEGGEQDKDRSIRLVNGFLALAWDDLRNLCLFSYHRLKDCILVTARVVELLGRNSLRGLQKGWEALKYLGSLVQYWGLELKKSTTSLLDTLTIAVAEGTDRIIELGQSICRAIRNIPRRIRQGLEAALQ

SEQ ID NO: 241 - protein, 883 aa, Artificial Sequence
  Description of Artificial Sequence: Synthetic polypeptide
MRVMEILRNYQQWWIWGILGFWMLMICNVGGNLWVTVYYGVPVWKEAKTTLFCASDAKAHETEVHNVWATHACVPTDPKPQEIVLGNVTENFNMWKNDMVDQMHEDVISLWDQSLKPCVKLTPLCVTLECGNVSVSNVSVSNTTQGDANVTHNEGANEIKNCSFKIATELRDKEQKVYALFYRLDIVQLNDSSNSSSSNNSSKYSKYRLINCDTSTVTQACPKVTFDPIPIHYCAPAGYAILKCNNETFNGTGPCTNVSTVQCTHGIKPVVSTQLLLNGSLAKGGVIIRSENLTENAKIIIVHLNESVEINCTRPNNNTRKSVRIGPGQTFYATGEIIGDIRKAYCEINEQKWNKTLREVAKSLAKHFPNREIRFAPSSGGDLEIVTHSFNCRGEFFYCNTSGLFNRTYTTDLFNKTYNDNDTEDNSGPVIIIPCRIKQIINMWQEVGRAMYAPPIAGNITCNSSITGLLLTRDGGNDNKTSTNETFRPLGGNMRDNWRNELYKYKVVEIKPLGIAPTTAKRRVVEREKRAVGMMGAMFLGFLGAAGSTMGAASITLTVQARQLLSGIVQQQSNLLRAIEAQQHLLQLTVWGIKQLQARVLAIERYLKDQQLLGIWGCSGKLICTTAVPWNSSWSNKSYDEIWENMTWMQWDKEINNYTDTIYRLLEDSQIQQERNEKDLLALDNWKNLWNWFNISNWLWYIKIFIMIVGGLIGLRIIFAVLSIVNRVRQGYSPLSFQTLIPSPGGPDRLERIEEEGGEQDRDRSIRLVNGFLALAWDDLRNLCLFSYHRLRDFILVTARAVELLGHHSLRGLRKGWEALKYLGSLVQYWGLELKKGAISLFDTIAIAVAEGTDRIIEFLQRLCRAIYNIPRRIRQGLEAALQ

SEQ ID NO: 242 - protein, 854 aa, Artificial Sequence
  Description of Artificial Sequence: Synthetic polypeptide
MRVKGIQRNWPQWWIWGILGFWMIIICRVVGNLWVTVYYGVPVWTEAKTTLFCASDAKAYEREVHNVWATHACVPTDPNPQEIVLGNVTENFNMWKNDMVDQMHEDIISIWDQSLKPCVKLTPLCVTLNCTDVKVNATSNGTTTYNNSIDSMNGEIKNCSFNITTEIRDKKQKVYALFYRPDVVPLNENSSSYILINCNTSTTTQACPKVSFDPIPIHYCAPAGYAILKCNNKTFNGTGPCHNVSTVQCTHGIKPVVSTQLLLNGSLAEEEIIIRSENLTNNAKTIIVHLNESIEIVCTRPNNNTRKSIRIGPGQTVYATNDIIGDIRQAHCNISKTKWNTTLEKVKEKLKEHFPSKAITFQPHSGGDLEVTTHSFNCRGEFFYCDTTKLFNESNLNTTNTTTLTLPCRIKQIVNMWQGVGRAMYAPPVEGNITCNSSITGLLLVRDGGNTSNSTPEIFRPGGGNMKDNWRSELYKYKVVEIKPLGVAPTKAKRRVVEREKRAVGIGAVLFGFLGAAGSTMGAASITLTVQARQLLSGIVQQQSNLLRAIEAQQHMLQLTVWGIKQLQARVLAIERYLKDQQLLGLWGCSGKLICPTTVPWNSSWSNKSQTDIWDNMTWMQWDREISNYTGTIYKLLEESQNQQEKNEKDLLALDSWKNLWSWFDITNWLWYIKIFIMIVGGLIGLRIIFGVLSIVKRVRQGYSPLSFQTLTPNPRGLDRLGRIEEEGGEQDKDRSIRLVNGFLALAWDDLRSLCLFSYHRLRDFILVAARAVELLGRSSLRGLQRGWEALKYLGNLVQYGGLELKRRAISLFDTIAIAVAEGTDRILEVILRIIRAIRNIPTRIRQGFEAALL

SEQ ID NO: 243 - protein, 867 aa, Artificial Sequence
  Description of Artificial Sequence: Synthetic polypeptide
MKVRGTQRNYPQWWIWGILGFWMLMICNVERNLWVTVYYGVPVWREAKTTLFCASDAKAYDQEVHNVWATHACVPTDPNPQERSMENVTENFNMWENDMVDQMHEDVISLWDQSLKPCVKLTPLCVTLNCTDAKVNITADNSKTYNESMKEIKNCSFNATTVIKDKKQTVYALFYKLDIVPLDNEEQENNGNENYTYRLINCNTSTITQACPKVTFDPIPIHYCAPAGFAILKCNDKTFNGTGPCSNVSTVQCTHGIKPVVSTQLLLNGSLAEEEIIIRSKNLSQNHRTIIVHLNESVGIECTRPSNNTRKSIRIGPGQTFFATGEIIGNIRQAHCNISKEKWDKTLQMVGKKLAEHFPNKTIIFAPASGGDLEITMHSFNCRGEFFYCDTKKLFNATYMNDDTANNSRSNGNDTVTLPCKIKQIINMWQEVGRAMYAPPIAGNITCKSNITGLLLVRDGGKMNQNIETNKTETFRPEGGNMKDNWRSELYKYKVVEIKPLGIAPTKAKRRVVEREKRAVGLGAVFLGFLGVAGSTMGAASITLTAQARQLLSGIVQQQSNLLKAIEAQQHLLQLTVWGIKQLQTRILAIERFLQDQQLLGIWGCSGKLICTTAVPWNNTWSNKSESEIWNNMTWMQWDREISNYTFTIYQLLEDSQIQQEKNEKDLLALDSWNSLWSWFNITSWLWYIKIFIMIVGGLIGLRIIFAVLSIVNRVRQGYSPLSLQTLIPTPREPDRPRGIEEGGGEQDNATSIRLVNGFLALAWDDLRNLCLFSYRHLRDLLSVIARVVGLLGRVGGGGLQRGGKAPKLGGLGAYWGLEIKKSVFSCLIRLAIAVLKGTVRFLKLVQDFGKGINNYPRRIPGFETGL

SEQ ID NO: 244 - protein, 864 aa, Artificial Sequence
  Description of Artificial Sequence: Synthetic polypeptide
MRVMGTLRSCQRWWIGGILGFWMLFMCSVGEDLWVTVYYGVPVWKEAKTTLFCASDARAYEKEVHNVWATHACVPTDPNPQEMILKNVTENFNIWKNDMVDQMHEDIISLWDQGLKPCVKLTPLCVTLNCSNVNSSSVANSTNSTNSGNITNANTTNVNITDSDMKNCSFNITTELRDKTRKEYALFYRPDIVPLSNSNSSEYILINCNSSTITQACPKVSFEPIPLHYCAPAGYALLKCRDTKFNGTGPCKNVSTVQCTHGIKPVVSTQLLLNGSLAEDEIVIRSENITNNAKTIIVQLKEPVTIMCTRPNNNTRKSMRIGPGQTFYATGAIIGNIRQAHCNISRTNWTKTLQEVGEKLQEQELFKNKTIKFTEHSGGDIEITTHSFNCGGEFFYCNTSELFNGTYSNGTYTPNNNGSDSNLTITIPCRIKQVVNLWQGVGQAMDAPPIAGISWGSIRGLLLPGGGPNPSTAEIFRPGGGDMRDNWRSELYKYKVVEVNPLGIAPTRAKRRVVEREKRAVGIGAVFLGFLGAAGSTMGAASVTLTVQARQLLSGIVQQQSNLLRAIEAQQHMLQLTVWGIKQLQARVLALERYLRDQQLLGIWGCSGKLICTTAVPWNSSWSNKSYDAIWDNMTWMQWEKEIDNYTDTIYRLLEVSQTQQEQNERDLLALDKWNNLWSWFNISNWLWYIKIFIMIVGGLIGLRIIFAVLSIVNRVRQGYSPLSLQTLIPSPRGPDRPGGIEEEGGEQDRSSSIRLVSGFLALAWDDLRSLCLFSYHRLRDLVLIAARGVNLLGQRGWEALKLLWSLVQYWGLELKKSAISLFDTLAITVAEGTDRIIEIVQRTWRAICNIPRRIRQGFEAALQ

SEQ ID NO: 245 - protein, 826 aa, Artificial Sequence
  Description of Artificial Sequence: Synthetic polypeptide
MSVKDILENYQHWWIWGLLAFWMQMVCMGDNLWVMVYYGAPVWREAKPTLFCASDAKGYNKESQSVWATCACVPTDPPPQELVLGIVTEYFNVWKMDGIHCEGYNLLGYQPKPVCKGNICVLKLYICYCYQQFWLVGEMKNCTLNATTELRDNRKKESALFYRLDVLPLNSSDNNNNEYRLINCSTSAITQACPKVSFDPIPIHYCAPAGYAILKCNDRTFNGTGPCKNVSTVQCTHGIKPVVSTQLLLNGSLTKEIIISSENLTKNTKTIIVHLNESVGIVCIRPNNNTRKSVRIGPGQTFFATGAIIGEIRQAYCTVNGSAWNNTLQRVRKKLRRYFSKAIRFEPSSGGDLLLTTHSFTCRGGYFYCNTSNLINNNINIASASTIQRRIKQIINMWQGVGRAMYAPPIAGNITCKSNITGLLLTRDGGENNRTETFRPGGGDMKDNWRSELYKYKVVESKPLGIAPTKAKRRVVEREKRAVGLGAVFLGFLGAAGSTMGAASITLTVQARQLLSGIVQQQSNLLKAIEAQQHMLQLTVWGIKQLQARVLAIERYLEDQQLLGMWGCSGRRICTTALSWNSSWSNKTYDDIWNNMTWMQWDREISNYTDTIFRLLEDSQNQQEKNEKDLLALDSWKNLWSWFNITKWLWYIKIFIMIVGGLIGLRIIFAVLSIVNRVRQGYSPVSLQTLIPAPRGPDRPGGIEEGGGEQDKDRSIRLLNGFLTLVWDDLRSLCLFSNHRLRDFILQSQRAVEVVGRRGWEAKKYAGGGLQYWGEELKQSGFSSNDTIAIVVEEGTDRIIQVLQWIGRASNNIPGRIRQGFEVAGQ

SEQ ID NO: 246 - protein, 839 aa, Artificial Sequence
  Description of Artificial Sequence: Synthetic polypeptide
MRVMGMQRNCQKWWVWGILGFWMFMIYNVMGNLWVTVYYGVPVWKEANPTLFCASDAKGYEREVHNVWATHACVPTDPNPQELFLENITENFNMWKNEMVEQMHQDIISLWDQSLKPCVKLTPLCVTLRCSNVTYNETIREMTNCSFNVTTELRDRRQEVYALFYKLDVVSLNKSGDYRLINCNTSTITQACPKVSFDPIPIHYCAPAGYAILKCNDEEFNGTGPCGNVSTVQCSHGIKPVVSTQLLLNGSLAENVTIRSENLTNNAKTIIVQLREPVYINCTRPNNNTRKSIRIGPGQALYATGEVIGDIRHAHCNISKEKWKTALTGVRERLRELFNRTILFNKSSGGDLEVTTHSSNCRGEFVYCDTSDLLTTSVSVQKVLVITSTDAIILRCQIQHIISMWQVRRALYAPPMKGMRSSTCTITGTTDLRDGRTDYHSMYIVRPGGGDMRDNWRSELYKYKVVEVKPIGIAPTGAKRRVVEREKRAALGAVFLGFLGAAGSTMGAASVTLTVQARQLLSGIVQQQNNLLRAIEAQQHMLQLTVWGIKQLQTRVLALERYLRDQQLLGIWGCSGKLICTTNVPWNGSWSNRSQQEIWENMTWMQWEREIDNYTNIIYELLEVSQNQQETNERDLLALDKWNNLWSWFNISNWLWYIRLFIMIVGGLIGLRIIFAVLSIVNRVRQGYSPLSFQTLIPNPRGPDRPGGIEEEGGEQDRDRSIRLVSGFLALAWDDLRSLCLFSLLHLRDLIEIVARAVELVEHSSLRGLQRGWDTLNYLRSLVQYRSKEIKKSATNMLDTTAIAVDEVTDSIIGFAQRIWRGICNIRARIRQGYEAGGQ

SEQ ID NO: 247 - protein, 869 aa, Artificial Sequence
  Description of Artificial Sequence: Synthetic polypeptide
MRVRGILRNYQQWWIWGILGFWMFMICNGVGNLWVTVYYGVPVWREAKTTLFCASEAKSYEKEVHNVWATHACVPTDPNPQEQVLDNVTENFNMWENDMVEQMHEDVISLWDQSLKPCVKLTPLCVTLNCTDINITGGGAECMASNERIREVRNCSFNATTEIRDKKQKVYALFYKLDIVSLYNLDIVAIQASSGHYRLINCNTSAITQACPKVSFDPIPIHYCVPAGYAILKGNNKTFKGPGHGNKVSTVQTHGIKPVVSTQLLLNGSLAEEEIIIRSKNLSDSTKIIIVQFNQSVKIVCARPNNNTRKSIRIGPGQVFYATGDILGDIRQAHCNISKNKWKDTLHNVSKILAEQFSIKTIIFTSSSSSTLNFNRHSFNCRGAFLYCNSCYLFNRLYTAANTKSNSWIDINCTVAIPCRIKQIINMWQEVGRAMYANPIEGNITCKSDITGMLLERDCGKERDKTISTTKEIFRPIGGNMRDNWRSELYKYKVVEIKPLGVAPTEAKRRVVEREKRVAGLGAVFLGFLGAAGSTMGAASITLTVQARQLLSGIVQQQSNLLRAIEAQQHLLQLTVWGIKQLQTRVLAIERYLKDQQLLGLWGCSGKLICTTAVPWNSNWSSKSQTEIWNHTTWMQWDREINNYTNTIYQLLEDSQNQQEKNEKDLLALDRWKNLWNWFDISNWLWYIKIFIMIVGGLIGLRIIFAVLSIVNRVRQGYSPLSFQTLTPNPRELDRLGRIEEEGGEQDRDRSIRLVNGFFSLAWDDLRSLCLFCYHRLTDLISVTARAVELLGRSSLRGLQRGWKVLKYLGSLVQYWGLELKKSAIRLLDITAIAVAEGTDRIIEFFQRLCRAICNIPRRIRQGFEAALQ

SEQ ID NO: 248 - protein, 837 aa, Artificial Sequence
  Description of Artificial Sequence: Synthetic polypeptide
HQWWIWGILGFWMIYNVVGNLWVTVYYGVPVWKEAKTTLFCASDAKAYEKEAHNVWATHACVPTDPNPLEIVMGNVTENFNMWDNSMVEQMHEDIISLWDESLKPCVKLTPLCVTLECDNVTYTGNEDSITEKEMKNCSFNATTEIEDKKRKERVLFHSLDIVPLENNNSSNNGSSNKKYRLINCDTSTTTQACPKVSFDPIPIHYCAPAGYAILKCNNETFNGTGPCHNVSTVQCTHGIKPVVSTQLLLNGSLAEKEIIIRSENLTENAKIIIVHLNESIEIMCIRPGNNTRKSVRIGPGQTFYANDIIGDIRKAHCKVNRSKWNETLQKVGIKLKEHFNKTIIFESSSGGDPEITTHSFNCGGEFFYCNTSGLFNGTFNGTYTNSTQNETTITLPCRIKQIINMWQGVGRAMYAPPIAGNITCTSNITGLLLLRDGGNTTNSKEEEIFRPGGGNMRDNWRSELYKYKVVEVKPLGVAPTGAKRRVVEREKRAVIGAVVLGFLGAAGSTMGAASIALTAQARKVLSGIVQQQSNLLRAIEAQQHLLQLTVWGIKQLQARVLAVERYLQDQQLLGIWGCSGKLICTTNVPWNSSWSNKSLDDIWGNMTWMQWDKEVSNYTHTIYSLLEESQIQQERNEKELLALDKWQSLWNWFDITNWLWYIKIFIMIVGGLIGLRIIFAVLSIVNRVRQGYSPLSFQTLTPTSRGPERLGGIEEEGGEQGKDRSIRLVSGFLTIVWDDLRSLCLFSYHLLRDFVLIVARGVELLGRRGWETLKYLGSLVQYWGLELKKSAISLLDTIEIIVAEGTDRIINFLQSICRAIRNIPRRIRQGFEAALL

SEQ ID NO: 249 - protein, 852 aa, Artificial Sequence
  Description of Artificial Sequence: Synthetic polypeptide
MRVRGIQRNWPQWWIWGILGFWIILSCRGVGDLWVTVYYGVPVWREAKTTLFCASDAKAHVREVHNIWATHACVPTDPNPQEMVLENVTENFNMWKNDMVDQMHEDIINLWDQGLKPCVKITPLCVTLRCTNATFTANDSNDNNVTMSEWTEMTTCSFSNTTQIGDALQTAYALLYLTDSKPLFERCYTSIHLPYLTHGTLGDPKASCYRAPIHYCAPAGYAIRKCNDRTFNGTGPCNRVSTVQCTHGIKPVVSTQLLLNGSLAEEEIMIRSENLTDNTKTIIVQLKEPVEINCTRPGKGKRTRVRIGPGRTFYATGAVTGDIRKAHCTVNGSRWNSTLEQVREKLKKYYDNRTIKFEQPSGGDPEVTTHSFNCRGEFFYCDTTNLFNISNINSTSNITLQCKIKQIINMWQKVGRAMYAPPIEGTITCISNITGLLLTRDGGSSNETSSINKTEIFRPGGGNMKDNWRSELYKYKVVEIKPLGIAPTGAKRRVVEREKRAVGIGAVFLGFLGAAGSTMGAASITLTVQARQLLSGIVQQQSNLLRAIEAQQHMLQLTVWGIKQLQARVLALERYLTDQQLLGLWGCSGKLICTTNVPWNSSWSNKSRADIWDNMTWMQWDREINNYTDTIYRLLEESQTQQEKNEKDLLALDSWKNLWNWFNISNWLWYIKIFIMVVGGLIGLRIILGVLSIVKRVRQGYSPLSFQTLIPNPRDPDRLGGIEEEGGEQDRDRSIRLVSGFLSLAWDDLRSLCLFSYHQLRSFILVTARAVQLLGRSSLRGLQGGWEALKYLGNLVQYWGLELKRSAISLLDTIAITVAEGTDRIIELIQGICRAICNIPRRIRQGFERALL

SEQ ID NO: 250 - protein, 814 aa, Artificial Sequence
  Description of Artificial Sequence: Synthetic polypeptide
MRVMGTSRNCQQGWIWGILGFWMFMICNVLGNLWVTVYYGVPVWKEAKTTLFCASDAKAYDTEVHNVWATHACVPTDPNPQELVLENVTENFNMWKNDMVDQMHQDVISLWDESLKPCVKLTPLCVTLNCSDATINGTIVEKMKNCSFNVTSTLKPTKLKAYALIYRTELVPLIENQINGNYMITGYLNNLNITKSGQTVSFGPFRPHPWPHAGQASLTVKCNNISFKGTGPCNKVSSVQCTQGIKLVEWTRLMLYGSIAEEQIEIRCENLTIKTGLIIVQLKESVAIRCERPKNNTRGSMRVGPGQTFYATGDIIGDIRQDHSNISEKEWNETKQKVVEKLIELLPTTRKLTRSSGGDPEITTHSFNCRGEFFYCDTTNLFNSTYNGTSTNSTSSGTITLSCSIKQIIQMWQGLRKVLNAPVCAPLDGNIKCTSNFTGLLLPRAGGSGLNDTDAEVFRPAGGDMRDNWRSELYKYKVVEIKPLGVAPTTAKRRVVEREKRAVGIGAVFLGFLGAAGSTMGAASITLTVQARQLLSGIVQQQSNLLRAIEAQQHLLQLTVWGIKQLQTRVLAVERYLQDQQLLGIWGCSGKLICTTAVPWNSSWSNRTQDEIWNNMTWMQWEKEINNYTGTIYRLLEDSQNQQEKNEKDLLALDKWQNLWSWFSISKWLWYIKIFIMIVGGLIGLRIIFAVLSIVNRVRQGYSPLSFQTLIPVPRTDRLSMCLFSYRHLRDVLLIAARILNLLGQRRWETIKYLGSIVQYWSIELKKSAINLLDAIAIVVAEGTARILEAIQRIWRAIFNIPRRIRQGLEAALQ

SEQ ID NO: 251 - protein, 884 aa, Artificial Sequence
  Description of Artificial Sequence: Synthetic polypeptide
MRVTGTRKNCQQWWIWGILGFWMLMIYNVKGLWVTVYYGVPVWREANTTLFCASDAKAYDKEVHNVWATHACVPTDPKPQEQWLKNVTEDFNMWKNNMVEQMHEDIISLWDQSLKPCVKLTPLCVTLNCTNATSIVNMTDVASNRSRSNDTVENVNGTSVENMTIVNSTDEIKNCSFNITTGIGDKPKKESALFYSLDIVPLNKSANNSEYILITCKTSKITQACPKVSFEPIPIHYCAPAGYAILRCDNKTFNGTGPCNNVSSVQCTHGIRPVVTTQLLLNGSLAEEDIIIRSVNMSNNAKTIIVHLNESVEIICTRPNNNTRKSVGMGPGQAIYTTGAIIGNIRQAHCNISGRNRSRTLQRVSEKLQKYFYNKTIKFQPHSGGDPEITTHSFNCGGEFFYCNTSDLFNSTYFNNTYFNGVYNGTRDNGTITLPCRIKQFINMWQRVGRAMYAPPIQGLITCRSNITGLLLTRDGGNTINNTNNNTEIFRPGGGDMRDNWRSELYKYKVVEIRPLGVAPTDARRRVVGREKRAVMGALFLGFLGAAGSTMGAASMALTVQTRQLLSGIVQQQSNLLRAIEAQQHMLQLTVWGIKQLQAGVLALERYLQDQQILGIWGCSGKRICTTDVPWNSSWSNKTKEYIWGNMTWMQWDKEISNYTGIIYDLLEESQNQQEKNEQELLALDSWKNLWNWFNITNWLWYIKIFIMIIGGLIGLRIIFAVLSIVHRVRQGYSPLSFQTLIPNQREPDRPGRIEEEGGGQDRDRSIRLVSGFLALAWGDLRSLCLFSYHRLRDCISIAARAGELLGRSSLKGLQRGWETLKYLGSLVQYWGLELKKSAISLLDTIAIAVAEGTDRIIEFIQRICRAICNIPRRIRQGLERILL

SEQ ID NO: 252 - protein, 875 aa, Artificial Sequence
  Description of Artificial Sequence: Synthetic polypeptide
MRVTGIPRNWPQWWIWGILGFWIMVMCNKTENLWVTVYYGVPVWTDAKTTLFCASDAKAYVKEVHNVWATHACVPTDPNPQELELKNVTEDFNMWKNDMVDQMHEDVISLWDQSLKPCVKLTPLCVTLNCTEVTPNCTKVNNSSSNNTTVAPTTATCNNHTKDNASIIGEREMRNCSFNITTEIRDKKQKAYALFYRPDIVPLNGNPNTTEYILINCNTSTITQACPKVTFDPIPIHYCAPAGFAILKCNNKTFNGTGPCNNVSTVQCTHGIKPVVSTQLLLNGSLAEEDIIIRSENLTSNTKTIIVHLNESVKIECLRPGNNTRKSIRIGPGQTFYATGAIIGDIRQAHCNISTLAWNATLERVRGKLKEHFPNKTINFTSPAGGDLEVITHSFNCQGEFFYCNTTNLFDKFNSSGPNITTIPCRIKQIINMWQEVGRAMYAPPIAGNITCNSNITGLLLTHDGINITYNGTGNTTIIFRPGGGNMKDNWRSELYKYKVVEIKPLGVAPTKAKRRVVEREKRAVGLGAMILGFLGTAGSTMGAASITLTVQARQLLSGIVQQQSNLLRAIEAQQHMLQLTVWGIKQLQARVLAIERYLKDQQLLGLWGCPGKLICTTNVPWNISWSNKSYNKIWDEMTWMQWDKEISNYTDTIYRLIEDSQSQQEKNEKDLLALDSWNNLWNWFNITNWLWYIRIFIMIVGGLIGLRIIFCVLSVVRRVRQGYSPLSFQTLIPNPRGPDRPERIEEGGGEQDRRKSIRLVSGFLALAWDDLRSLCLFSYHHLRDFILIVLRAVELLGRSSLRGLQRVWEALKYLGNLVLYWGQELKKSAISLLDTIAIAVAEGTDRILEVLQGIWRGIRNIPRRIRQGFEASLL

SEQ ID NO: 253 - protein, 859 aa, Artificial Sequence
  Description of Artificial Sequence: Synthetic polypeptide
MRVMGILRSYQQWWIWGILGFWMVMTCNVGGNLWVTVYYGVPVWKEAKTTLFCASDAKSYEKEVHNIWATHACVPTDPDPQELVLENVTENFNMWKNDMVDQMHKDIISLWDQSLKPCVKLTPLCVTLNCTDVKGNVTYSDKGNLAHSNSTDEMKNCTFNVTTELRDKSKKESALFYRLDIETLDPKGNSSNNNSSYKEYILINCNTSTIAQSCPKITFDPIPIHYCAPAGYAILKCNNKAFNGTGPCNNVSTVQCTHGIKPVVSTQLLLNGSLAEGGIIIRSANLTDNAKTIIVHLNESVGITCVRPGNNTRKSVRIGPGQTFYATGQIIGDIRQAHCNITGSEWNRTIDRVGKKLQEHFPNKTINFTQPSGGDLEITMHSFNCGGEFFYCNTSGLFNTSGLFNDTEGWINPINKTSNITIQCRIKQFINMWQEVGRAMYAPPIAGNITCTSNITGLLLTRDGGNSSSNTEIFRPGGGDMRDNWRSELYKYKVVEIKPLGIAPTTAKRRVVEREKRAALGAMFLGFLGAAGSTMGAASVTLTVQARQLLSGIVQQQSNLLRAIEAQQHLLQLTVWGIKQLQTRVLAIERYLKDQQLLGIWGCSGKLICTTAVPWNSSWSNKTQNEIWNNMTWMQWDKEVSNYTDQIYRLLEKSQNQQEKNERDLLSLDSWNSLWSWFSITKWLWYIKIFIMIVGGLIGLRIIFAVLSVVNRVRQGYSPLSFQTLIPSPRGPDRPGRIEEEGGEQDRNRSTRLVSGFLALVWDDLRSLSLFSYHRLRDFILIATRAAELLGRSSLRGLQRGWEALKYLGNLVQYWGQELKRSAISLFDTIAIIVAEGTDRIIELAQRICRARQGETALL

SEQ ID NO: 254 - protein, 858 aa, Artificial Sequence
  Description of Artificial Sequence: Synthetic polypeptide
MRVMGIQRNCQQWWIWGILGFWMLLICNGMGNLWVTVYYGVPVWKEASPTLFCASDAKAYESEVHNVWATHACVPTDPSPQELVLKNVTENFNMWKNDMVEQMHQDIISLWDQSLKPCVKLTPLCVTLNCSNVDNSTTINGTIHPNEEGKNCSFYITTKLKLKIRQKFALFYDPDNLILIDNDNSMYLLNCNTSTITQTCPWVSFDFDPIPYCDRAAYGILIRNNNKFNVTGPCPSVNAGQCTRGIGTMPSTPLLLNGNITKEDIVIISEYLDNNANVIIIQLNKTVPVNCTRPRHNTRTRVRMRPGQRLYVSADIIGNIRLAHCHCIGSGRYDTLELVKLNTLEHCLYHKTIMFTHPSGGALPTTTHTLNCGGELFYCSTSSLLNFTWRSLFCHAQAPFQETHNNSTNNIPFPCRIKQFINMWQTVGRAMYAPPIAGVITCNSNITGLLLTRDGGNPTNSTEGNNETEIFRPGGGDMRDNWRSELYKYKVVEIKPLGVVPTKAKRRVVEREKRAALGAMFLGFLGAAGSTMGAASIALTVQARQLLSGIVQQQNNLLRAIEAQQHMLQLTVWGIKQLQTRVLALERYLRDQQLLGIWGCSGKLICTTAVPWNSSWSNKSQEEIWDNMTWMQWEREIDNYTDIIYNLLEVSQIQQETNEKDLLALDKWHNLWSWFDISNWLWYIKIFIMIVGGLIGLRIIFAVLSIVNRVRQGYSPLSFQTLIPSPRGPDRPGGIEEEGGENDRGRSIRLVSGFLGLAWDDLRSLCLFCYHRLRDLLLIAARVVELLGQRGWEILKYLGSLVQYWGLELKKSAISLLDTVAIVVAEGTDRIIELIQRAWRTICNIPVRIRQGFEAALL

SEQ ID NO: 255 - protein, 866 aa, Artificial Sequence
  Description of Artificial Sequence: Synthetic polypeptide
MTVMGIQMNCPQWWRWGILSLWMFMIWNVWGKGNLRVTVYYGVPVWVEAKTTLFASDANAHSEEVHNVRATHACVCAHPNPQEINVTENFNMCKNDMEKQMHEDIVSLCHQSLKPCVRVTPLCVTCHLTSSVITDTDTISSSLIINDDDSNMNCCSFITTAVNRDKKKDDAALYYRLVVVPDDEEKKNNCSECRLINCNSSAVPQACTKVSDEPILIHYCAPAGYAIIKCNDTTFNATAPCNNVTALQCPRGITPVVSHQLLLNGSAAERGDSIRSENITNNATTIIVHLKNPVEISRNYCTRPHINTRKSMRIGPGQIFYATGDIIGNIRQAHCNISAKEWNETLLMVSEKLLKHFPNKTTINFPSSSGEDQTITKRSFCRGEQFFYCNTSILSNTTYSYNSTSNTTCSTNNTTTSTFTLQCRRIHIIIMCLEPGLAIDASPTAGEIISKSNTTDLLLTRAGGSNRTEIFRPGGGDMRDNWRSELYKYKVVEIKPLGIAPTKAKRRVVEREKRAVGIGAVFLGFLGVAGSTMGAASITLTVQARQLLSGIVQQQSNLLRAIEAQQHMLQLTVWGIKQLQTRVLAIERYLKDQQLLGIWGCSGKLICTTNVPWNKSWSNKTQKDIWDNMTWMEWDREISNYTDIIYSLLVDSQTQQEKNEKELLALDSWKNLWNWFNITNWLWYIKIFIMIVGGLIGLRIIFAVLPIINRVRQGYSPLSFQTIIPNPRGPDRLGRIEEEGGEQDRNRSIRLVNGFLALAWDDLRSLCLFSYHRLRDFILIVVRAVELLGHSSLRGIQRGWEALKYLGSLVQYWGLEIKKSAISLFDTLAIVVAEGTDRIIELVQRIFRAICNIPRRIRQGSEASLL

SEQ ID NO: 256 - protein, 887 aa, Artificial Sequence
  Description of Artificial Sequence: Synthetic polypeptide
MRVRGILRNWQQWGIWGILGFWMLMICNVVGNKDLWVTVYYGVPVWKEAKTTLFCASNAKAYEREVHNVWATHACVPTDPNPQKIDLENVTENFNMWKNDMVDQMHADVISLWKESLKPCVKLTPLCVTLNCTEVTVIKNTGVNMTNNSTSTSIDTSILNDTSNADLKNCSFNTTTKISDNEIFEFAVNNTLDVEPIDGTYTSITFRLTNSNSSSIPQACPKVSFDPLPIPYCAPAGYTGLRCSNNTFTGTGPCRNVSTVQCTHGIKPVVSTQLLLNGSLAEGEIMIRSENLTNNAKTIIVHLNESVNIVCTRPNNNTRKGVGIGPGQAIYATGAIIGDIRQAHCNITKRGWNGLPQKVKGKLREHLPGKLIIFQPHSGGDLQITMHTFNWGGEFFYCNTSVLSNSTHNSGTGWHLQSSDINSYATIAVSYRIGQIINMWRQVGRAIYGPPVARKMSAHPSTTGLLLVCDGGEKSLNSTNGTGITNATEIFRPQGGDMKDNWRSELYKYKVVEIKPLGIAPTEARRRVVEREKRAVGIGAVILGFLGAAGSTMGAASIALTAQARTVMAGIVQQQSNLLRAIDAQQHMLQLTVWGIKQLQARVLALERYLKDQQLLGIWGCSGKLICTTTVPWNTSWSNRSKEEIWNNMTWMQWEREIDNYTEIIYQLLGESQIQQEQNEKDLLALDSWKNLWSWFSISNWLWYIRIFIMIVGGLIGLRIIFAVLSIIHRVRQGYSPLSLQTLIPNSREPLDRLGRIEEGGGEQDRSRSIRLVNGFLALAWDDLRSLCLFCYHLLRDFILIVARVGELLGHSSLRGLQKGWEALKYLGSLVQYWGLELKKSAISLLDTVAIAVAGRTDRIIEVIQEICRAIYHIPRRIRQGFEAALL

SEQ ID NO: 257 - protein, 863 aa, Artificial Sequence
  Description of Artificial Sequence: Synthetic polypeptide
MKGRRNTENLSPGWIWGILGFWMLMMHKGEGNLWFTVYYGLPVWTEPKPTLFGASNAKGYKTEVHMVWATHACVPTNPNQQDLVLENVTENFSMWKNDMLDQMHEHVVIFSDQGLKPYAKVTSLTVTVTCTDLKNSTFTSTSSNDTSMVTESEEMKNCSFNITTEIRDKKKKEYALFYRLDIVPLKEKEDNNSDYRLINCNTSAVTQACPKVSFDPIPIHYCAPAGYAILKCNNKTFNGTGPCNNVSTVQCTHGIKPVVSTQLLLNGSLAEKEIVIRSENLTNNAKIIIVHLNESVEIVCTRPNNNTRKSMRIGPGQTFYATGDIIGNIRQAYCNISEKRWNETLQKVSKKLREHFPNKTIKFKPSSGGDLEITTHSFNCGGEFFYCNTSKLFNSTYPPNSTDTYMNSANTSNIILQCRIKQIINMWQGVGQAMYAPPIAGNITCESNITGLLLTRDGGNNQTEEETFTPGGGDMRDNWRSELYKYKVVEIKPLGIAPTKAKRRVVEREKRAVGIGAVFLGVLGAAGSTMGAASITLTVQARQLLSGIVQQQSNLLRAIEAQQHMLQLTVWGIKQLQTRVLAVEGYLKDQQLLRIWAASGKLICTTNVPWTPSWSIKSQEEIWNNMTWMQCDREITYTENLIQCLAPQPRKWKDTTCNGDLDLDKWQNLWKWFNIPKWLWYIELFIMIVGGLIGLRIIFAVLSIVNRVRQGYSPLSFQTLLPSPRGPDRLGGTEEESGEQDRDRSVRLVNGFLPLVWNDLRSLCLFCYHQLRTFILVTARAVELLGRSILRGLQTGWEALKYLGGIVQYWGLELKKSAISLFDTLAIVVAEGTDRIIEVVRGFFRAIYNIPRRIRQGLEAALQ

SEQ ID NO: 258 - protein, 835 aa, Artificial Sequence
  Description of Artificial Sequence: Synthetic polypeptide
MRVMGIHEELSTMGWIWGILGFWMLLICNVMGNLWVTVYYGVPVWTEANPTLFCASDAKSYEPEVHNVWATHACVPTDPNPQELVLENVTENFNMWKNGMVEQMHQDIISLWDQSLKPCVKLTPLWVTLNCSDVNVTAIIDADILTMYEPVINRSFSTTPKLKKKTETDLFHYVEVEALDMTATDDGYINCNTSTLTITCPCVSFAPVPIPYCAPAGYAIPIRNGNNFTGPGPCPSVNAFQGTRGLEPVASTPLLLIGNVAKNEIVIISETLTHNVKMVMVQLNETVTINCTRPNNNTRKSIRIGPGQAFPATATIEGDIRQAHCNINKTEWNNTLQKVREKLRKHFNKTIKFDSSSGGDPEITTHSFNCRGEFFYWDTTKLFNETYNNTDANGTIIMPCRIKQIINMWQKVGRAMYAPPIEGPITCISNITGLLLTHDGEENDTETFRPWGGDMRDNWRSELYKYKVVEIKPLGIAPTKAKRRVVQREKRAALGAMFLGFLGAAGSTMGAASITLTVQARQLLSGIVQQQSNLLRAIEAQQHLLQLTVWGIKQLQTRVLAIERYLKDQQLLGIWGCSGKLICTTAVPWNSSWSNKSQEEIWDNMTWMQWDREINNYTGIIYNLLEVSQNQQEKNEEDLLALDKWQNLWNWFDITQWLWYIKLFIMIVGGLIGLRIIFAVLSIVNRVRQGYSPLSFQTLIPNPRGPDRPGGIEEEGGEQDRDRSIRFVNGFLALAWDDLRSLCLFIYRQLRDLILIAARAVEILGQRGWETLKYLGSLVQYWGLELKKRAISMLDTTAIVVAEGTDRIIEVVQRTWRIICNILTRIRQGFEAALL

SEQ ID NO: 259 - protein, 841 aa, Artificial Sequence
  Description of Artificial Sequence: Synthetic polypeptide
MRVMGIQRNYQRWWIWGILGFWMFMICNVRGNLWVTVYYGVPVWKEADPTLFCASDAKAYEREVHNVWATHACVPTDPSPQELVLENVTENFNMWKNGMVDQMHQDIISLWDQSLKPCVKLTPLCVTLSCNNTIVVNATIRMIQKDCSFNTTTELRDKRQTAYALFYKLDIVALSEKSSEYRLINCNTSAITQACPKVSFDPIPIHYCAPAGYAILKCRDANFNGTGPCKNVSTVQCTHGIKPVVSTQLLLNGSLAENETIIRSENLTNNAKIIIVQLKTPVEINCTRPANNTRKSIRIGPGQTFYATEEIIGDIRQAHCNISGKTWNATLKDVGDKLKRHFPNGTIKFLPSSGGDIQITTHSFNCGGEFFYCCTSYLLNNTLDNNTINDTTNNGGTNDSIILQCRIKQIINVGQEVGRAMYAPPIKGNITCRSNITGILLAEDGGPINETETFRRGGGDMRDNWRSELYKYKVVEIKPLGIAPTKAKRRVVGREKRAALGAMFLGFLGAAGSTMGAASITLTVQARQLLSGIVQQQSNLLRAIEAQQHMLQLTVWGIKQLQTRVLALERYLRDQQLLGIWGCSGKLICTTAVPWNSSWSNRSQEEIWENMTWMQWDREINNYTNIIYELLEVSQNQQEKNEKDLLELDKWQNLWNWFDITHWLWYIKIFIMIVGGLIGLRIIFAVLSIVNRVRQGYSPLSFQTLIPNRRGPTSPGGLEEEGEDQDRGRSFRLVRGFLALPWDVLRTLCLFSSHRWRDLFWIAARAVELLDQRGWKTFNFLGTLVQYGGRKLKKSVISLFNTPPILVAEETDRFMKLFQRFGRAFSNIPGRLSQGLEAAFQ

SEQ ID NO: 260 - protein, 875 aa, Artificial Sequence
  Description of Artificial Sequence: Synthetic polypeptide
MRVRGILRNYPQWWIWGILGFWMIYNVMGNLWVTVYGVPVWKEAKTTLFCASDAKAYDREVHNIWATHACVPTDPNPQELVLKNVIENFNMWKNDMVDQMHEDIISLWDESLKPCVKLTPLCVTLNCTKVTVNGTASNSTATNDTATNGTNTVNSTDATKTKIGNSTDDMKKCFFNVTTEIRDKEKKEHALFYKLDIVPLGNSSRNNYSEYRLINCNTSAITQACPKVNFDPIPIHYCAPAGYAILKCNDETFNGTGPCNNVSTVQCTHGIKPVVSTQLLLNGSLAEKETIIRSENLTENTKIIIVQLNRSVEINCTRPGNNTRTSIRIGPGQSFYATGEIIGDIRQAHCNISAKKWNETLQEVGKKLQEHFENKTIIFANSSGGDLEITTHSFNCRGEFFYCNTTSLFNNIYSNKTGSPNEKEIITLPCRIKQFINMWQKVGRAMYAPPIAGNITCKSNITGLLLLRDGGNFSRDNETFRPGGGDMRDNWRSELYKYKVVEIKPLGVAPTKAKRRVVEREKRAALGAVLIGFLGAAGSTMGAASMALTVQARQLLSGIVQQQSNLLKAIEAQQHLLQLTVWGIKQLQARVLAIERYLKDQQLLGIWGCSGKLICTTAVPWNSSWSNNRTHDYIWENMTWMQWDREVNDYTDTIYRLLEKSQNQQEENEKDLLALDSWNSLWNWFSITKWLWYIKIFIMIVGGLIGLRIIFTVLSLVNRVRQGYSPLSFQTLTPSPGGPDRLERIEEGGGEQDRSRSIRLVSGFLSLAWEDLRSLCLFSYHRLRDFILVTARAVELLGRSSLKGLQRGWEALKYLGSIVQYWGLELKKSAISLLDTIAITVAEGTDRIIEFIQSICRAIRNIPRRIRQGFETALL

SEQ ID NO: 261 - protein, 870 aa, Artificial Sequence
  Description of Artificial Sequence: Synthetic polypeptide
MRVMGISRNCQQGWILGILGFWMLLMCNGTGNLWVTVYYGVPVWKEANPTPPLFCASDAKAYETEVHNVWATHACVPTDPDPQELELKNVTEDFNMWKNGMVDQMHQDVISLWEQSLKPCVKMTPLCVTLNCTYVTSKNTTDNSTSTMLLSVNATDSDMKNCSFNVTTELKDKQKKVYALFYLLDIRQLNDSSNTHTGNSSNTGNYSDYILINCNTSTIAQACPKVSFDPIPIPYCAPAGYAILKCNDKNFNGTGTCTNVSTVQCTRGIKPVVSTPLLLNGSISEGDIVIISKNLTDNAKTIIVQLNQTVAVNCTRPTNNTRTGIRIGPGRAFYATGDIIRDIRQAHCNISGGDCNRTLEEVEKKLNESFSGNETIQFEPTSGGDPEITTRSFNCGGEFFYCKTSKLFIKTWKSWNHRNDGTIITIPCRIKQIIHMWQGVGRAMYAPPISGPITCRSNITGLLLTRDGGISDNNSTNTTEIFRRQGGDMKDNWRSELYKYKVVEIKPLGIAPTKAKRRMVQRERGEKRHGAMFLGFLGAAGSTMGAASITLTVQARQLLSGIVQQQSNLLRAIEAQQHMLQLTVWGIKQLQTRVLALERYLRDQQLLGIWGCSGKIICTTAVPWNSSWSNKTHDQIWKNMTWMQWEREIDNYTGIIYNLLEVSQIQQEQNEQDLLALDKWQNLWSWFDITNWLWYIKIFIMIVGGLIGIRIIFAVLSIVNRVRQGYSPLSFQTLIPNPRGPDRPGGIEEEGGEQDRDRSVRLVNGFLALAWDDLRSLCLFCYHRLRDLILIAARVLELLGQRGWEALKYLKNIVQYWGLELKKSAVSLLDTVAIAVAEGTDRIIEVIQRAWRAFCNIPTRIRQGFEIALL

SEQ ID NO: 262 - protein, 844 aa, Artificial Sequence
  Description of Artificial Sequence: Synthetic polypeptide
MKVKGTRRNCQQWWIWGILGFWMVYNVVGNLWVTVYYGVPVWREAKATLFCASDAKAYEKEVHNVWATHACVPTDPNPLERVLENVTENFNMWKNDMVDQMHEDIISLWDESLKPCVKLIPLCVTLNCTTAKNKSEEMNCSFKVTTELRDKKRKEYALFYRLDVVPLNETNESSNDTNGDFREYRLINCNTSTLTQACPKVTFDPIPIHYCAPAGYAILKCNNKTFNGTGPCNNVSTVQCTHGIKPVVSTQLLLNGSLAEEEIIIKSENITDNAKTIIVQLNKAIEIECIRPSNNTGRSVRIGPGQTFYTTGEIIGDIRQAHCNISGNWDRTLYNISKKLGEHFPNKNISFKPSSGGDPEITTHSFNCGGEFFYCDTSQLFNKTYNVTDDSNTTDTNNTIQCRIKQIINMWQEVGRAMYAPPIAGSITCTSNITGLLLTRDGGGGTNSTSNTEEIFRPGGGNMKDNWRSELYKYKVVEVQPLGIAPTKAKRRVVEREKRAIGIGAVFLGFLGAAGSTMGAASITLTVQARQLLSGIVQQQSNLLRAIEAQQHMLQLTVWGIKQLQARVLAIERYLKDQQLLGIWGCSGRQICTTNVPWNTSWSNKSLNDIWNNMTWMQWDKEISNYTNIIYQLLELSQNQQEQNEKDLLALDKWQNLWSWFDITHWLWYIKIFIMIIGGLIGLRIIFAVLSIVNRVRQGYSPLSFQTLIPSQREPDRLGRIEEEGGEQDKDRSIRLVHGFLAIAWDDLRSLCLFSYHRLRGFILVTTRVVGLLGQRGWEALKYLGSLVQYWGLELKKSAISLLDTIAIVVAEGTDRIIELILGICRAIRNLPRRIRQGFEAALL

SEQ ID NO: 263 - protein, 861 aa, Artificial Sequence
  Description of Artificial Sequence: Synthetic polypeptide
MRVRGTQMNCQGWWRWGIMIIGLIIICRAKEDLWVTVYYGVPVWKDAETTLFCASDAKAYDTEKHNVWATHACVPTDPNPQEIDLDNVTENFNMWKNGMVDQMHKDIINLWDQSLKPCVKLTPLCVTLNCTNININNSTDNGTSITNEIGDEIKNCSYNITTEFRDKRRRVSSLFYRHDIMPINEKNDSRTYILINCNTTTITQACPKVSFEPIPIHYCAPAGYAILKCKDKDFNGTGPCKNVSTVQCTHGIKPVVSTQLLLNGSLAEGGIKIRSENITNNAKTIIVQLDTPVKINCSRPNNNTRDRIGIGPGQAFFASNRIIGNIRQAHCNISASIWNMILQKVAEQLAKQFPNKNISFTNHSGGDLEITSHTFNCGGEFFYCNTSSLFNRTFPANYTYNRTADSTQGNTTITIPCRIKQIINMWQRVGQAMYAPPIEGVIRCESNITGILLTRDGGNETNVEVFRPEGGNMRDNWRSELYNYKVVRIEPLGVAPTRARRRVVEREKRAVGLGAVFLGFLGAAGSTMGAASITLTVQARQLLAGIVQQQSNLLQAIEAQQHLLKLTVWGIKQLQARVLALERYLRDQQLLGIWGCSGKTICTTTVPWNSSWSNKSQEEIWGNMTWLQWDKEISNYTDLIYVLLQESQNQQDRNEQELLALDKWANLWNWFDISNWLWYIRIFIMVVGGLVGLRIVFAVISIVNRVRQGYSPLSLQTLTPNQEGLDRLGRIEEGGGEQGRGRSIRLVSGFFSLAWDDLRSLCLFSYHRLRDLVLIAARIVELLGSSLLKGLRLGLEGLNYLWNLLLYWGGELKTSAISLFDTTAIAVANWTDRAIELGQRICRAIRNIPRRIRQGFETALL

SEQ ID NO: 264 - protein, 855 aa, Artificial Sequence
  Description of Artificial Sequence: Synthetic polypeptide
MRVRGISRNCQQGWIWGILGFWMLMICNVWGNLWVTVYYGVPVWKEAKTTLFCASEAKAYETEVHNVWATHACVPTDPNPQEMTLENVTENFNMWKNDMVDQMHEDIISLWDQSLKPCVKLTPLCVTLNCTNATITGDGNNTDGTNGTARLLIYHGDIANCSFNETTELKDKVSKEHDLFYRLDVKPLNEEKNNSTHNTSILINCSSSKVTHPCPKVSFDPIPIPYCAPAGYAILECRDKAFSGTGPWPYVYTLQCPHGNWPVVSTQLLMYGFLSENRRDNTNNITVHLSESVDIMCTRPSNNTRRRIIGIRPGRVSMMRGDMIIYLRATYCNIRDTRAACNITLRDVVDELHLQFDETITIAPSSGGPPEDNTNSSTCGEDLCCCNTSQLIHSSICHNNPTSEPSKNRAANPTFIIPCRVKQVLSMRLVLREAMYAHPISGDVLLTSDVGGLISTRDNANSANEIFRPGGGDMRDNWRSELYKYKVVEIKPLGIAPTKAKRRVVEREKRAVGIGAVFLGFLGTAGSTMGAASITLTVQARQLLSGIVQQQSNLLKAIEAQQHMLQLTVWGIKQLQARVLAIEKYLQDQQLLGIWGCSGKLICTTTVPWNSSWSNKSLEEIWDNMTWMQWEREVGNYTEIIYKLLEDSQSQQEKNEKDLLALDNWNNLWSWFNISNWLWYIKIFIMIVGGLIGLRIIFAVLSMVRRVRQGYSPLSLQTLIPNPRGPDRLGGIEEEGGEQDRDRSVRLVSGFFSLAWDDLRSLILFLYHHLRDLLLIAARTVEILGQRGWEALKYLGSLVQYWGLELKKSAISLLDTIAISVAEGTDRIIEIVQRIWRAIYNIPRRIRQGFEAALL

SEQ ID NO: 265 - protein, 861 aa, Artificial Sequence
  Description of Artificial Sequence: Synthetic polypeptide
MRVKGTQQELSTLGWIWGILGFWMLLMNNVGGGKWGVTYYEGVAGRKEATTTLCGAYDAKYDNDVQHVGWTTAGGVPTHPPPQEMLLNVVEDFFMMRNDEVEHMMDDDIILWQRLLPCCVTMTLCGAHSTCSNINSTATINDSDGGMTMCDFIRGEIKNCSFNITTDFRYKLDKEPALFYKPDLVPLNNDNSSYRLTNCNTSAGTQACPKASFDPIPAPYCAPAGYAILECNNGTFNGTRACNNVSTLECTHGIKPLVSTHLLLNENLANDIVIISDNLTIIAVIIIVHLKNDGTIVCTRTSNSTRIRLRIGSGPVCYATGEIIQDIRHAHDHISRSDWNDALRNVREHFRKHFPKFNTMRFTQSVGGNLQITTRRFNCVGEFFHCSTTGLFTDTYGTSTCGTNSTGNTSGIHTITLHCKIKQFINMWQGVGLAMYAPSLAGNIICKSNFTGLVLTCDGGEGNNVTNLTETFRPGGGDMRDNWRSELYKYKVVEIKPLGVAPTKAKRRVVEREKRAVGIGAVFLGFLGAAGSTMGAASITLTVQARQLLSGIVQQQNNLLRAIEAQQHMLQLTVWGVKQLQARVLALERYLRDQQLLGIWGCSGKLICTTAVPWNTSWSNKSQEEIWNNMTWMQWEKEIDNYTDIIYKLLEVSQTQQEKNEKDLLALDSWQNLWNWFDISKWLWYIKIFIMIVGGLIGLRIIFAVLAIVNRVRQGYSPLSFQTLTPSPEGPDRLRGIEEEGGEQDRTRSIRLVSGFLALAWDDLRSLCLFSYHRLRDFILIVVRAVELLGHRGWWETLKHLGSLELYKGVEIKKNAISLLKPTATAGAEGTVQIIEIVLRIIRSIFNLPRRVSQGFKAAQQ

SEQ ID NO: 266 - protein, 873 aa, Artificial Sequence
  Description of Artificial Sequence: Synthetic polypeptide
MRVMAIQRNCQHLLSWGTMILGILMICSAANNLWVTVYYGVPVWRDAETTLFCASDAKAYDTEVHNVWATHACVPTDPDPQEIDLKNVTEEFNMWKNNMVEQMHTDIISLWDQSLKPCVKLTHLCVTLNCSTANVNVTDYNITTGDKEEIKNCSFNMTTELSDKKQKVHSLFYRLDVVPIKPDNSDDNRSNSSYSNYRLINCNTSAITQACPKVTFDPIPIHYCAPAGFAILKCKDDGFNGTGPCKNVSSVQCTHGIKPVVSTQLLLNGSLAGKGIRIRSENITDNTKTIIVQLDKPVRINCTRPNNNTRKSMRIGPGQTFFATGDIIGDIRKAHCNISISEWNETLYKVAEQLGGIIGNKTVKFANSSGGDLEITTHSFNCGGEFFYCNTTDLFKGTWHPDNKTWSDPWNASMKSNNTSNVNITILCKIKQIVRMWQRVEQAMYAPPIQGVISCSSNITGLLLTSDGGRDNSNNTGGQKNTETFRPGGGNMRDNWRSELYKYKVVKIEPLGVAPTPARRRVVQREKRAVGLGAVFIGFLGAAGSTMGAASVTLTVQARQLLTGIVRQQSNLLKAIEAQQHLLRLTVWGIKQLQARVLAVERYLKDQQLLGIWGCSGKLICTTNVPWNSSWSNKNQSEIWDNMTWLQWDKEINNYTQIIYDLLEESQNQQEKNEQELLALDKWTNLWNWFNITNWLWYIKIFIMIVGGLIGLRIVFAVLSIINRVRQGYSPLSFQIHNPNPGGPDRLGRIEEEGGEQDRDRSIRLVSGFLALAWDDLRSLCLFSYHHLRDFILIAARTVEILLRRAWEGLKYLWNLLLYWSRELKISAISLFDTIAIAVAGWTDRVLEIGQAICRAILHIPRRIRQGLERLLL

SEQ ID NO: 267 - protein, 857 aa, Artificial Sequence
  Description of Artificial Sequence: Synthetic polypeptide
MMVMGTLKNLSWGRIWGIGFFWMLMICNGEDTLWVTVYYGAAVWKEATTTLCCAYDAIPYETELHVGWATPACVPTDPHPQEHVFENVLEPFIMWNDDMEQMMHDSIIYLCHRRLPPLVPLCVSQLCHEVDIYKNTTTANATSSMDVTVTEELKNCSFSTTTDIKDKKQKAYALFYKLDLAPLLIGDDIVINMSCTASTVCRAGAFVPFPPIHCAPCAPAGFASRECKDNEVRGTRHGVTVHRGHGTHAMVPSPPLLLVGNGKQEKEDISDKSKNYANKVIILLLQLRTCEEIKCTKNTTKTRRSVRRGPFFASLEIRGEIRQAPRTNSASNGSAGITLIGEELLQHLDHNTIRSVPSSPCERETLTHTTPSCGWEVFYCVSIQICNGVYFTDTWTTYNSNDADYTDILTLTCRIKLIVNLSQELGRARSAPPIDGSVKCTSNFTGLVLTRAGGNATGDVTAENNTEIFRPGGGEMRDNWRSELYKYKVVEIKPLGVAPTEAKRRVVEREKRAVGIGAVFLGFLGAAGSTMGAASITLTVQARQLLSGIVQQQSNLLRAIEAQQHMLQLTVWGIKQLQTRVLAIERYLKDQQLLGIWGCSGKLICTTTVPWNASWSNKSYNEIWDNMTWMQWDREINNYTDTIYRLLEDSQNQQEKNERDLLALDSWNSLWNWFSISNWLWYIRIFIMIVGGLIGLRIIFAVLAIVNRVRQGYSPLSFQTLIPNPRGPDRPGGIEEEGGEQDRGRSIRLVHGFLALIWDDLRSLCLFCYRRLRDLTLIVARAVELLGQRGWEILKYWGNLVQYWVLQLKNSAISLLDTVAIPLAEGPDRILEVVQRFCRAILNIPRRIRQGFEAALQ

SEQ ID NO: 268 - protein, 107 aa, Artificial Sequence
  Description of Artificial Sequence: Synthetic polypeptide
AIQLTQSPASLAASLGDTVSITCRASQSISSDLDWYQQQPGKAPKLLIYAASSLQSGVPSRFKGSGSGTDFTLSISGLQAEDVATYYCLQHSSAPYGFGAGTKLELK

SEQ ID NO: 269 - protein, 107 aa, Artificial Sequence
  Description of Artificial Sequence: Synthetic polypeptide
AIQLTQSPASLAASLGDTVSITCRASQSINKWLAWYQQQPGKAPKLLIYSASTLQSGVPCGFKGSGSGTDFTLTISGLQAEDVATYYCQQHHSAPYGFGAGTKLELK

SEQ ID NO: 270 - protein, 127 aa, Artificial Sequence
  Description of Artificial Sequence: Synthetic polypeptide
EEKLVESSGGLVQPGGSLRLSCVGSGFTFSSVWIHWVRQAPGKGLEWLAAISTGGGSTYYADSVKGRFTISRDNSQNTAYLQMSSLRTEDTARYYCARGRSYSGWSSPYGDYTMDLWGPGVEVVVSS

SEQ ID NO: 271 - protein, 127 aa, Artificial Sequence
  Description of Artificial Sequence: Synthetic polypeptide
EEKLVESGGGLVQPGGSLRLSCVGSGFTFSSTYINWVRQAPGKGLEWLAAISTSGGSTYYADSVKGRFTISRDNSQNTAYLQMNSLRTEDTARYYCATNNNNNNNNNNNNNYAMDLWGPGVEVVVSS
